United States Patent Application Publication US 2020/0010842 A1 - sequence listing, part 2

SEQ ID NO: 1 - DNA, 2658341 bp, Artificial (residues 1,329,172-2,658,341 of 2,658,341)
  Glycine max
  misc_feature (103753)..(104839): n is a, c, g, or t
  misc_feature (209110)..(211854): n is a, c, g, or t
  misc_feature (291836)..(291935): n is a, c, g, or t
  misc_feature (389067)..(389166): n is a, c, g, or t
  misc_feature (419259)..(419358): n is a, c, g, or t
  misc_feature (443611)..(443710): n is a, c, g, or t
  misc_feature (599696)..(599795): n is a, c, g, or t
  misc_feature (756814)..(760025): n is a, c, g, or t
  misc_feature (781507)..(781606): n is a, c, g, or t
  misc_feature (782495)..(782720): n is a, c, g, or t
  misc_feature (788906)..(789137): n is a, c, g, or t
  misc_feature (888185)..(898864): n is a, c, g, or t
  misc_feature (906092)..(906936): n is a, c, g, or t
  misc_feature (911845)..(911971): n is a, c, g, or t
  misc_feature (916367)..(916475): n is a, c, g, or t
  misc_feature (929997)..(933000): n is a, c, g, or t
  misc_feature (937043)..(939575): n is a, c, g, or t
  misc_feature (941184)..(942288): n is a, c, g, or t
  misc_feature (1005853)..(1006465): n is a, c, g, or t
  misc_feature (1069118)..(1069217): n is a, c, g, or t
  misc_feature (1084469)..(1084904): n is a, c, g, or t
  misc_feature (1085962)..(1086544): n is a, c, g, or t
  misc_feature (1089131)..(1089667): n is a, c, g, or t
  misc_feature (1090800)..(1091327): n is a, c, g, or t
  misc_feature (1115013)..(1115496): n is a, c, g, or t
  misc_feature (1116960)..(1117664): n is a, c, g, or t
  misc_feature (1166110)..(1166456): n is a, c, g, or t
  misc_feature (1193544)..(1193643): n is a, c, g, or t
  misc_feature (1195091)..(1195346): n is a, c, g, or t
  misc_feature (1196453)..(1196552): n is a, c, g, or t
  misc_feature (1211640)..(1211739): n is a, c, g, or t
  misc_feature (1235009)..(1235108): n is a, c, g, or t
  misc_feature (1251926)..(1255136): n is a, c, g, or t
  misc_feature (1263794)..(1264245): n is a, c, g, or t
  misc_feature (1269110)..(1269366): n is a, c, g, or t
  misc_feature (1278021)..(1278120): n is a, c, g, or t
  misc_feature (1285084)..(1286438): n is a, c, g, or t
  misc_feature (1287825)..(1288070): n is a, c, g, or t
  misc_feature (1307014)..(1309426): n is a, c, g, or t
  misc_feature (1341890)..(1342100): n is a, c, g, or t
  misc_feature (1441966)..(1442071): n is a, c, g, or t
  misc_feature (1445194)..(1445293): n is a, c, g, or t
  misc_feature (1446717)..(1446816): n is a, c, g, or t
  misc_feature (1455755)..(1455955): n is a, c, g, or t
  misc_feature (1458443)..(1473148): n is a, c, g, or t
  misc_feature (1475299)..(1475935): n is a, c, g, or t
  misc_feature (1486634)..(1487015): n is a, c, g, or t
  misc_feature (1487866)..(1488349): n is a, c, g, or t
  misc_feature (1489349)..(1490348): n is a, c, g, or t
  misc_feature (1497438)..(1508885): n is a, c, g, or t
  misc_feature (1510324)..(1511850): n is a, c, g, or t
  misc_feature (1584465)..(1584957): n is a, c, g, or t
  misc_feature (1650541)..(1660103): n is a, c, g, or t
  misc_feature (1661222)..(1662081): n is a, c, g, or t
  misc_feature (1665037)..(1673760): n is a, c, g, or t
  misc_feature (1860694)..(1861645): n is a, c, g, or t
  misc_feature (2306806)..(2306905): n is a, c, g, or t
  misc_feature (2532762)..(2533138): n is a, c, g, or t
  misc_feature (2602330)..(2602429): n is a, c, g, or t
  misc_feature (2604640)..(2604739): n is a, c, g, or t
  misc_feature (2628594)..(2628693): n is a, c, g, or t
gattcagaagagaactcgccataacaaaatattttgctaagtgctcattaacacatttgtattcttgtgtcaattgcttcaacactaattctgaatcaccccttatgtttacatttcttgcccccagactaattaaaatttcaaggcctgtaattagagcttcatactcagcctcattattagaacaaagtcctttgattttaaatttgaatttagttggaactttattgggggatattattaaaattccaattccagttccatgtttgtgtttcgaaccatcgaaatacaaaatccaaggctctgtatcgacatagtcttgcggcatttcgaccactgagtgatctacaataaaatctgccacaatttgacccttaacagatttcaaaggcttgtacgttaaagaatattctgttaatgctaaagcccattttccaattctactgtgtagaataggttttgacaacatgtgcttaataatatcataatgagaatatacataaacatcaacaggctttatatattgcttaagttttgcacaagagaaatacaaacaaagacaaagtttttctatggcagtatatctagtttctgcatcatttagtacacgactaagataataaattgcatgctctacgccatcatcatcttcctgagccaacatgctaccaatggtcttgtcagatgcagcaatatacaacttcatagtcttgtttcgactaggaggcattaacacaggaggcttgatcagatattctttaatttcatcgaaagccttttgatgctcttcattccatttgaatggttcatctttcttgagtcgaagtaatggcgaaaaaatttgagctttgccacttagattcgaaatgaatcgcctcaagaagttgatttttcctagcaaagactgaagctgttttttggtcgaaggaggcttcgtctcaagaatagcctttgtcttattttgatttatctcaatgccttttttatgcaccacaaaaccaaggaaatctcctgcacgcacacaaaaagcacactttaatggattcatttttaatccatgtttcctcattcgttcgaaagattgcctaagataatccaaatggctatcttctgaggaggatttgatgattatatcatcaatataaatttgcataaatgtgtcaataaaatcatgaaacatggaattcatggccctttgataagtggccccagcatttttcaacccaaagggcataaccacccattcataagtgcctaaagcaccagggcatcgaaatgctgtttttgacacatcactttcagcaataaatatttggttataaccagaataaccatctaacatgcttaaaaattcgaagccagctgccgaatctaccaacatttccgctactggcatagcatattcatctttaggtgtagcattatttaaatccctaaaatctatgcatactctaagagttccattctttttaatgacagggactatatttgctaaccattcgacatacctggcagatctgatgaatttacacctcagcagcctttcgatctcttctttaattttggacatgatttctggtgcgaatcttcttggtagttgttttactggtctttttccctccttaatcggtaatttcatttcgaccatttctctgcttaacccaggcatttcgtggtaatcccaagcaaaacagtctttaaattctctaagaagaggcaccagcttttcttttagacttgaggtgatattggcactgatataggttggcctttttatcgagccatttccaatgtcgatctcctccaaaggatcttgagcctgcatctttggcacctcacttatgggatttttctcaaaacccagcggctcatcgtcataaatgcaatccagtcttcgatcctttgtttctttgttttcatgatcttcgatcttggcttcaactgccatattttgttgggattcagcctcaaaggccgtatttagtctattttcggccatataagccgtaattctggcccatgcagtggcctcagtcatattaatcttcatatatattccacccagttggtggaatgactccatcttcagagggaacagcatcaatttcctccctctcccatataaacccataggtaggatggagtttgacagagtggataacattgtcacttgattcgaaaacagcctccttgtcaccacaaggtgctatgttagccaactttttgtcaaaggtttgtgcagtaacattatcaacctctgacttatagaagctttgatctgcctctatattttcaacaatcccatcttccctccagataatgagtttctggtggagggtagatggcacagccccaactccatgaatccattcccttcctaatagcaagttaaaattagccttagactgtatcaccaggaatagagttggtcgaactatactgcctacagcaacatctacttgaatggctcccaaagaatagccagttttaccctcataattcgaaagcacaatgttatgggcagatagatcagtgtcatgtttcccgatcttgtggagcatagatcgaggcattaagttaacagccgctcctccatctatgagcactttgttgatgccaatattctcaacttttgctctgatgaaaagaggtttgagatgacttttcatctgaaaatctggcctttcgaaataagctaattgttcttcaacacagccattgttcataacatagtaacatactggctttgggtcagccatatcaaaatgatcgaactcactttcgatctcagtaacttcagactggacatcatattcagatggcaagatagataccacacaaatgacatcaaagtctggttcagaatccagtagatcctcatcctccatcttatcttcatccactggaggcagaagtctctcttttactggcctcctagatacttctttatactggcccgtttgcagattctgttgggccaatttcttctgacgctggaacctacgccattgggtcctcgtcataggattttttcctctgtaattgttcctataagagtacctattagcctcctatgggccaatttgcttcgttccactcgaaccgcctacttccatggcccctttgttgaaccttatgagtccctggtgcatccatttttcgaccggaactgaaccaggaggagcgaaagtattccttcgaccagacttctgattagtgttcgactgcaccataactcttttgcctttatcgaaacgttggttctgctttgcccccttgttaacaacttggtattctttgaggccctcagtagcctccctatcacatactgcactgcagcgagggcagagcatcacaatcttgttttcgagtttgcatttgttcaagaaatcaattaaatcctcctcagcctgaggatacacaaccttcatttgttcgttgtaatcctcttcagatatgccctgaacttgcacctgagacaactccattgtttcgaccatcattatttcttggggttctgcatagagagtttcagcagctttggatgtttcagcatttgcctgaacaacctttggtttctcaccaaatttgagcctcccttcgtcgagagccttttgaaccaaatccctgaaaagaacacaacgtgaggttttatggccaaggaaattatgaaatttacaataaccccttttcttctgttgttcgactgggggtactttcaagcccttaggaacaacgatctggccatctgtgactaataaatcaaatatttcatcgcatttagttatgtcaaatgtataagttttagacacaaatttatcatttttaggttcaacagggttttttccattggaaggtctaaggagtttacaaacatatggaggtccaggttttaattctgctaaatcaacctcattgtcctcgatatcttcataaataatatcgaactcctggtcactgtcattggtttcaacatatgcaaccttttccttcctgtggaacttagaatttctagccttttcagccttcaatcgttcgagttgtcgaactctatcagccaattgagccatatcccttaaatactgggtatctaatttctttctaatcgaatagtctaggccagcagcagccatttcgactaattcatgttcagggacttgggtgaaacaccttgcctttaagagtctgaatctgttcaaataatcatcaattgattcaggtgccttacgtcgaacgctggctaactctttaaggcttatcttagactgtcccatatagaactgctcatggaaaaccctctccaattggttccaattatgtatggaatgaggaggaagggttgtaaaccatgtgaaaacatttttagttaaggaattagggaaatatttcattcttaaattttcattattagccaagtcccctgcctcgaccaaatatctagcaacgtgttcgacagtagactcatttgtctctcctgcaaacttagtaaacttagggattttcacaccccttggtaattccgtctgtaacacatattcagacaatggagacacaaaattgggcctgtgtaagcccaagttcaaaccattctgtactagaattgtttcgaccatttgggccaagttattctgcctatcgaaacggttttgttgaacattccctattacttcatcagcattttggtttctatttaccaatactacaccagggtttggttcgacctgttgggctggtggctctatgcgtgccaatggttgtggtgcttgagccatttgcatccctggattattaggcatctgtatctctgggacaggcgcctgtatttggatctgtcgaattggtggttgatgtatgggtggtgccccaaaaaagtcagcaattcgacttatttgatttgttaacatttggtaactgtcatttgtattttgaattaaggggttaatgacagttcctatttgttgtgttaacatgttaaccatatcatggttactttcatccatttgttgtctgagtgacaaaacggatgtattggttaaatgttgaggaattaccctaccttgattgcttgctacagaccctgatggagaggacatattaagattctctatatttggttgagaattttgcaaccctgccatcaaagatgtaggcatgccatatagagggttttgaagtggtcgaaagggacttccactgggattccctaaactggggttattccatggggcaaaagcagacgctgacgtggtcgaacttgccaacgtcatgttggtcatgggagaagttacccctgtctgattcataactgtcgaagcggtcgaacttatcgtgccaacagtttggccaggcattgctcctatgccagaatttatattggcgttattgacagatgtctgcgttggttgcccctccatatttggaaggtcattgttttgattacttgggggtggtctagccatccttgtacgagttttaaattctgttaagtgtggaacagatttcccacttcttaaatgcatacaagatcaaaacaattaagaatgcaataaaccaactgttctaaacaaaactttaataataattttaaagccaaaacacacaattgaccggtcccactgggcgtgccaatttgtttacgctgaaatttggtaaacaatcgctagtctaatcgagttgcttgcgagatcgactagtgaatctcaggagcatgtcatttgtgtgtttgcatttaaatgtaaagctttgaatgttcatcattgcaacaaacctttactggttctgaggtttgcagaaagtaaaattctttgaaagaatcgaaatgctggaagtaaattgacaagggaaaggtaaattgcagaatttaaaggaccaacgaattcattcgatcgaatgaaccatttaaaagacaggaattatataaaaatgaaacgtaaattgcattgcattcgaaattgtaaagtttacagaaacttaaaatggttcacaatcatacattctccttgcgtactcgtttctctctgcgctgggtactttgagtgtataaggatttgtagaaatgatttgcgacctcgaaatctgactaaaaactgctatatatagacattcgaaaataaactgccctaacggtcgaacactatcctaatgccaagtgtcctgctacgtacaccttacatgcacataactgctccttagaacggttatccacattgctcgaagtcgaactgattttgtgaagttttgtcagaaattgtgctaagtccagaaatcttgctgccttgacttcgactcgaccatacaccagctcgaatcgcccaatggttcgaagccctccttcttgtcttagccttatatttcgtaaacacttccttgaacctgtgaatccctttcaatagactcttctttcttttcgattcgaacagtatccaacaaaattcgtatttagagcatatttttagctcatcaaaaaaaatatgggctaacaaatatcaagatattttattgaggtataactccaatctactactgatgagaaaacaaaactatatataattccaatcccatttttaatcaattaggagttacatccctttaaaaaatccagacttttcaatgactaacaccctttttctatgcaatatacagggatcaagtttgaatgtacaatcttgggatggaaatcaaattcgtatttggttgacgatattaaaaaagtagtcattcttttcttacagctttctgtcagaaaattgtaaattaaatcaaacatggatagaatatgctggaagccgtaaatgagtatttaattaagaagttgattggctttaaaaacttacaagagttccttgcattatgactagaaatgcaagggcaactattgtaaaaaatctcgagctaatgttaagggccatggctcaagcagaagaagatcgttgggataataagccaaaactctagcttgggagtttggaagtttggttgtgcttttgcatatactttgaggattgttgtgatgctttatggctagttaatgagggtatttatagcgtattcttcaagaggacaattttattcttttcttagtgatgaaaagggatattttatagaaggtggacttttcgatacgaatcaaaagagtggaaaacaaagaacaatagtttagttttttttttttacagaagtttgatttaacctacatgacatgaaaatgctttggaaaattttgattacacttaacacttttgtgtagagctttttataattcaaaaagaaatgagaaggtaaagaaagaagcatgaaatgatatgaatgataaattataaaatacaataatatataattcaaatttatgacaataaaaatgagataattttgtgtctcttttataaagaattggttttttaaatgcatattcataaaagataaaaataaatatatagaaaacaaaagtaactagatacgatattagatcaatttgtttttgttacaatattagatcaatttaatgaagatagaaccgtatgtcaaatagttcatgcattcactgatagaaattagaattatttttagttaattggcaatgtaaaaattgatgttgtgttatagtttttatctttaaatcagaagtatttttttttattaaagataatctacttgttcaatagaaatagaattattatagatgataattttttatataaatatttaatataattatatatttaagattcaaatttaaaacttccaattaaactaaaataagattacattgattgatcgatagacttagtgttttatggtgtgatagttagacaagatcatatcgatgcaagtgaacagtgtgagctaggtttgtatgatggctatgataatgacgaattaggtttcgtcactagctactactactagtcaagcagtgcccgctatcaatggagaacctgcgatactttatgtttgaaagaaaacaaaaagattgatcctactgggtcctcatacagaaactatctcatgctgaaaattacgaaattttaagaaattcaaatgaaaaatatagtgaacaataaaattttttaaaaaatcataaataacataattttatacatttcaatgaaaattattttcattttacttttataataaatgtcctcaccagttaacatgcatttggctaataataatggacagtgaagctacgtttcttattttcgacaaaatttaattagttctactgatctttttggtcaagctactattgaatatatatatatatatatatatatatatatatatatatatatatatatatatatatataaaattttccttttgggaaaaattaacaaatatcttttacattatgctggatatttttaatttaattaaaaatttaaaatacaacataaatgttatttacaacaaaaggaaagataaatttaaagtataataaatgatatgatggttagaaatagataaataaattgacgttgtctgaattatatgaattgttgtaagagtgtcatatttctatcatatataattttatcaacttacattctaaaaaaaaattatttactatgctctgaaaataagttggaaaaaaatatctaatcagttcgtactttattcatttttcatgatcaagtgaaaaaaaattaataatattggatgcccccatagtgtgcaactacagaccttcagtttgcaagactgaagtctctacgtaccattgagctacagaggcaagaacattctgaatcaaaaattgatttttcaattggttcttcctttcctcccttatactctcctcttttcataaaaaaaaggttagactcaataattttcatctttatgtttacaataatattttgttttatgtttttaatactaacctagagtctacagatcaaagttgctgaaaattatgttcattctcattcttggcgctgttagtctagtgtgaaaacggacaaattcagtttcctgttatatatggctctgtatataaaaaggaaataaaaaaaaagtagaatttgattatggctaatttcacccattatatttattacaagaaaacctttagataaaaattatttttttgtacttttagcttggtcgtaaacattaacgttacgtcacgcacacacacataaaaggcaaatcaaattattttatatccctaaattttatgaggaaggatgctaaaaatattaacaatacatctcacacacgcaaagacatctaaaactagatcactaagttttatgatgtgttacggtttgctttaaaatatggtacaaggtttatcagagaccggtttataagtaaaaaataaatttgtcataaagggagtaaaatggaaaataattaatttctaaattagaattaaattagaataacctgtgcagatcttataatttttgttcactaattcgcccaccacataatgctttaatatttcaaactttgtataatctaaaaagtataaaaatgaagattacgactttcagcctccagttccttttaatggaagaagtgagtaaatgttgatgcgatatcggtagctttcatgggcagtgaccttgtcaaagaatgcttgggcaatgatcattggttatttatggatatctcatcaaagttcttggcctggccggcttggagagtcaagtcttgtatgcagccacgagtcacgactttaattaacacgaaagaactaattattcacttcaatggttagtgactaaaattaaatataagtttttttcctattaaaccacgttttcttgaaccactagtcccccatttttggaaacaagaatatgatacacagaattgaacaactagttgatcttaactacaaatatgctcaatatgcaaatatgtacatcccaaaacagaatttaaataagactctcaaatttaaaaaaaaaaaaaaaaaagaaagaagatagcaataactacaatgcaaattgaacaacctggcaatacaatgatacaacatctgttgtaagcaacactaaacagtgatactatacgaggaaaaagattgaagtttgaaccacacatgatcaaggaaatgaaaataggcatgccgccatgatctacaaatcagcaaaggagcaatcactatccaaagtcccacaacaaatccaattgtcgcactaacaaaaaaccaattcactccatgcccatgacttccttcataactatgagttttcccattggagctgcagtttatgggcagtggtggaccacatagattgttgccaataaatctggaggcatcaaaggtttgcaattgagttcctgttggaatttttcccttcaaatgattataagacacgtctagcatgctcaaaaagctcaaattagaaatggttggagggatttcaccagaaagttgattccttgaaaaatcaatacactgtaacgatcccatattaccaataccttctgaaataggaccaatcaattggttgtgggacaagttcaaaaagttcaatccatttagatcggtgatttctctaggtatttctcctaataatttgttatttgacagatcaatacttgttaccaaacccagaatatttcgatactcatctcctcttccttttagccatagtagcacactaactatacctgataccgaagagtatcgtgtatcatttggtgcatgagaatagatacggggatctgtactccggttcactagtgtcatggcactcaagttacggaaacagctgggtatattgccagacaaattattttttgcaaggtctaaaacctgaagaagactcatctgacatatttcatttggaatgtgaccggaaaaactgtttgatcgaaggcggaggattttcatatttgagagcttttctccaacccatgttggaatacatcctgaaagattattttctccaagatccaaggatatcaattggctagtcttcttcaaactggtaggaaatattcccgagagcaagttgttacgaatttctaatgactgcagctcagccaaggaacccatggatggggggaagttcccaacaaaatggttgctttgtaaattcacttccactagaaatggccaattaatccaacaatcaggtatttctcctgacagattatttgatgcaagattgagaaattctaattgcattggcttgtcctgattgttacataaaaaatcttgcatggattcagagaatgaattggttgaaaggtctaactcatacacatcatttgaaagatagggtaatttaccacataagtgatttgtgcttagatcaacagtttggatagatattggattttttattgtagtcaccagctcaccatggatatgattatgagagaggtctaaatacaaaacctgagagtgtggttcccagaaccaagtgggaatagaatctaaaatccccgtgttagacagtccaacatattgaagtttgttttgtgattgaatccacgatggaaagttgggacctatctgccatgatgtcacatccaaataggtaagttgaaaattaggaatccaattaggacccacttttaaagtgaaattgttccctgatgcatcaaactccttcaaacttgtaagatttgcaagatcatcttcgttgacaactccttgaaaattattgccatcaataagaagcgttgacaatttagagagtgatccaagactttcaaatggatttccgctgaatttattaatagagagatagagatattttaaatctatctcccttgagttgcggagatttcccaaaaaagtcggaattgttccttcaagttgattatatgacaaataaagttcaacaagagaagtcaaatttcccagggcatcagaaatagtcccatgtaagttgttgccctctaggtccaggaacttgagacgatgaagaccgtataagcaatcaggtatagaagatgagaatgaattgaaagacaagtcaagattttgaagaagtgtgaggtttcgaataccaccaggaatcggaccttggatttcattacccggtaattcaagagaaacaagtttcttcaatttgaatatccacttggggacaaaagaaatggcaggggaataacgagtacgggaaagatggagagtttgcagagatgagaagttgagcaaggatggttcattatagtgagggagtgtgcatcctgacaaagataggtgggtcaaagaaggaagagattggagagtgtgtagccaatgaaatgctttggataggtttgcattactcaaatcaagatattcaagcttccacatacttgatagccattctacattttcagcaaacagaggaggttcgaaaccagaataacctccgaggtcaaggtagaccaaattggagagattcccaatctgagatggaatcttcccatggaatcgagtataagagaggtcgaggtgagtcaaggaggtcattgcacaaaggaaagaaggaattgccataccttttccaagtaaataattgccgctcaagtcaagatattgaagcttagagagattcccgatctgagagggtactgttccgttggcaacatatctcatgtcaagatacaccaaatttgagagattcccaatctgaggaggaatcttcccatagaatccactatcagagagattgaggtgagtcaaggaagtcattgtcccaaggaaagaaggaattgacataccttctccaaaggaaaggattgccgctcaagtttcnnnnnnnnnnnnnnnnnnnnnnnnnnnnnnnnnnnnnnnnnnnnnnnnnnnnnnnnnnnnnnnnnnnnnnnnnnnnnnnnnnnnnnnnnnnnnnnnnnnnnnnnnnnnnnnnnnnnnnnnnnnnnnnnnnnnnnnnnnnnnnnnnnnnnnnnnnnnnnnnnnnnnnnnnnnnnnnnnnnnnnnnnnnnnnnnnnnnnnnnnnnnnnnnnnnagaatcattcagattattcttaaacttcataagtgtctcacgctcacttgggatgcacacactctctctgcatggtaagcttaacaacaaaaggtggacaaagacaagaatataaatggaggaattcatgatcacacaagaatatatagaaaacaagtgtagttgttggttctgcatataaatcatcaaacttctattatttatactgctgccctgcctgtttttttcttcactttcattatttttttacctttttttattgttgtgccaaatactaaaatatttttttaatattttaattcacttcttagaacggtttcctttatactgatgcaagtgtctttctttttttttttttggtgtttcctttttttaattattgactttattatccaattctccgacttaattcttagaataggaaataattattttattaaaatcaataaaatttattgtatttcatggtttcttcaaaataacttttaaaggacaaaatatcctaattaaaaacaagaatttgatcaaatggactaaaatgacatattttttaaaaatatctcaattaaaaaataaaaagactaaaattacaagattttttaaaaataagagataaaatatttcaattaaaaataaaaaactaaaataacatattaaaaaaagacgacaattatattttaagccttttttttcactttcattattttttacgtgtttttattattgtgacaaatactaaaatatttttttaacattttaattcacttctttttttacgctggcttttttaaattatcgacttaattatccaattctcccgaattaattcttagaatacgaaaaattatgcatttactgtatctatctctttttttaaaattcctatgtacactaaattcataaaaaaaattaataacaaagaaatatgattaattcttgtgctcaatactaaaataaataacattctttttggtacagcttttttttttacaaaaataaataagaatcactttattttaatttaccctatagaactgcttaaatgaaaatttggtatcattaaactttgaattttaactattatttaatcaatcctttcgttaaacttttgttacgaaaacagtaaaagtccaatatttttaaaaaagaaaaaatcaagtcttctatttcatgatattccaacccataattaatattaaattatcaaattttcaatattcaaactaaaaataatgtaaaagaaaatttgtcttctaaaccaaagctcacaccatcaagtccatctcaaggttttccatttgttgatcttgaacctttgggcactccaccaagtccagccatgttatggtctgacttcttcaactttaaccataggtcactccattaccttcatatcaagttcgtcattgacaacaattattgcgagttaagtcaagcaaggaaaaaatatataattgattaataaatcaattataggaaaagggtgtactttaaagaccatttcagtttaaaaaaatctatataaaaaaaagattatctcgttccaatctagctatttaattttgatcaacttttcaattcacaaaataatactcttatatatgaaaaaagactaaatttaattgtcatcaattggaaaggttgttgtatcatgcatttctaattgtatttaaatctgaatattatttttttatcatataaaaattacttagttatataaaaagaagtgtgaaaaagaatattaactttttttctacaaaaattggtatcatattttgtattttttacaagttatcaacttaaataagaggagaaacataattttaatttccatttcactttttaaataattgcaagtgtcaaatttaaaatatcataaaaatactcacgttcaatttaatattctaaaaaaaaaaacaaattcatacgataacttaaacaatctatagagaaatataatttattcttgtgccaaatactaaaataagaaacattttttattttaatttaccgtatataattgcttaaatcaatgaaaaatttatcttaaaaaaatattaataatttttttaatctttgagtaatttacatcagaggtaactaaatttagcttaattcgtcttcaaattttaactattatttaaatcagttcttttgttacacctgtgttaagtatataacaaaaagtcttgcattataaaattcaaatattttattacttgcaatttgaacccataataaattttaaactatcaaatttttattattcaaaataaaagaaatgaaaacaaaattttctcctagagaaaccgctggccactccaccaaatccatatcaaggtccccacttttccaacttgaaccatagactactccatcaagtccatgtcaaggtcctccattttttcatctttaaccttaggacactccacaaagtccacccatattaaggtctctgacttcttcaactttatccatagcccataggccactccaccaagttcatgtcaatgtccccccacttcttcaacttgaaccataggtcaccacattacattcatatcaagttccttatcattgactacaaatgtttagaattaagtacgcaaggaaaaaattaatgatgaatacatcaattatagaaaaaaggatataatttaaaaattatttcagttaaaaaatctatataaaaaaagactatttcgttcctatctagctattttattttgatccattttttaattcacaaaataatattcttcttatatatgaaaaaagactaattttcattgtcattaattggaaaaattgttatgtcgtctatttctaattgtattttaacctgcatagtattttctttttcattaaaaattaattagtgagatacaaaaaaatgtaaaatgcttgtttaacttggtctatcataattattgaatcatagtttttccttttataagtcttggtccaaatttcttcacgtattgtagatcacatttaacttaaaatgtaaattagaggatatgatctactagaagggtggcatgtttttgaaattatttatctatggtcctagctatttaatttttagaccacaagtcttcatatattaaaatcttttcctgaatttcatttacttatgtggtgatattttaagaatagtgatagaagagaaaaataaatatacaatttattgaatattattattttttatcataaaaattagtatcatattttttattttctttacaagttgtcagcttaaataataggagtagcataattttaatttccattttactttttaaataattttaagtgccaaatttaagcaatcataaaaatattcacttcaatataatattcttaaaaaataattcatacgataacttaaataatctacaaagaaatgtaatttattcttgtgccaaatactaaaataagaaacattttattttctttgtttaacttatagaattgcttaaattaatgaaaattttattttaagtaaatattaatatttttataaaaaaacattaatagtttacaataaaggtaataaaatttggtttaataatgagtcttcaaatttaatcattaattaaatcaatcctttcattacacgtgtgttaagtaaacaacaaaaagtcttgcattattaaattcaaggcttctattacatgcaatttgaaattataattaattttaaattatcaaatttttattattcaaaataaaataaaagaaaaaaaattatcttctagacaaaccgtagacaactccaccaaatccatatcaaggccccactttttcaacaggaaccataggccactccatcaaaaccatgtcaaagtttttttatgattgacaacaaatgttgagagttatgtcaagcattaaaaaaaatagactaaaatatatcattttcattcctataaaattttaatatgttacttttttttatcctaagttaattttggatgatcgataattatcatgtattcttagatttttgtgtcattttaagacatttatgtgatgtatatctcatgtttttttattgtcatgaactaatcttctcttagagtttaatgtaattgtttcttcttccatgtaataactacttttttttattcaataaaacattgtaattgtttctcttttatgcctaatatgtgtttttggcttgcaccagtttgcatgatttttcattcaattgtaatagaaaaattccattaagttgcgaattggatagaacacccaataatttttatgtctagggatatttgagcatcaataaacactttgtcttaatgcaaattgtttgattatgctaatccaaaggattgatagtttaatcaagggatttagctctcttcacttaagaaattaaagttaagataatatggtaggttaatgataatataatctttattaaatataaatgtgtagtgattacgtgataggaactccaataaaattaaacccgaacaattttttcattgatttaatctcaatttactttgcatacacgagtgtttgttaaaattcccaaacaaaaaattttcccttaattttttcttttatttccttccttaattttctttatctttatgcatattgttatttagatgaatttagctaatcttaattaatttcaaatattcatagtgtagaaatttctttatctttattcatagtgtagaaatattggtaggaacccaactatgatctcaatctcaaccggtcataaaacccaacgactgtgatctccactgccaccaccgttgcaaaacccaatgagccccaactcacaacaaacctcattgtgaaatcccacatgaaattcaaatgtgaatccagccatgaaacctagtgaagccaaccaaacattgttcttttctcgattttgtggtttaatgttttgatattaagattttgttggttcatatctattctttcatctattttgttttcatttagtccaaccaccagggaaaaaacgaaacaccatcagtggcacagtggtgggatatgaggaaaatgaagggtgatggagagatagataagagagagaagaaatgggcaaatacaacattgtttttatttaaaaaaaacttttttccacgtataatctgttaattgatacgcttacgtaatttaaatgtttaaatcacataacaattatctaattttcctctcttttattgcttcttttgtgttagaacattagaaatttaacttcttctgagtttttgtccaataaatgttaaagttatcaaatttatagtattttttagtgtatttttttttatagaattacacagtaggaggtctgtaatatggttgaagaactggagcagttcgctcagcgcgtcaacaaccgttcaacgcgaggagccaacttggaggtcatgcttagcgtgcatacgacgacttagtgcgcatctacagcttagcctgtatgtggcggcttagtacgcatctgcggtttagcctgcaccttgcggcttaacgcacattcacttatgtcagatggactttgcatgtgcgcttcgcgagcacatgctggcttagcgcatgatcaatatcacaaaacatgattgtgcttcattttaaaggaaaaagaaaggaaaaatcaagcaattctttagtgggaccaaaattgagaagctaagacacgagagatgagagaaaatctattcacttgggaccctttcctccattttctttcacacctcttgctttctttttgtattagtaaccctctcatgacaatgagaggctaaatcacccattgttgggagttcaactattaaacactcttgatgtaatgattctaactatttatttaatgttattttaatattattgtctttttctgtgcttaatatcatgtttatagcttgattacctattctcatgtagtgttatagggtttatgtattggaaaatgtttatttcctatgaacttgaaaagaacatctaggtaatccatgtttaggaatagaatgatattattttgccttatttattatacatctttattcttaaagcaaattatttcatatagctcttaagggattaagagtgaaattaggtaattcaaactctttcacatgagaaatcatgattagggtatgttactggatgaaggtaataatcaaaataacgttaaatagtaaaaaacccttaatgttgcatcaagagtaattttgataggttgagtctcaacatattctgtaattctacttcaactgacaacccacctctgagtgtttgtattctatctctttaatgtactatgcttaattatcttcatttatgtcaaattttatattccgtatcattatttgacaaatatcaattttaatttattgattacttaaaattgaacatatacaaactctggatacagttaaagtccttgtaaactcgatactcgatcttactgttttatatacggaaatttatcgggaccaataagcaggtaaaaaatatgctttttaacccacaatatgaatgtaaacatgcggtcgaaatgtgtatacttattttattcaaaaaacaaacatttggatagcatacatacacgaattcatgaaaccaaaaattaaataaaaaaagccaaacataacaacaaatgaacgagagaaaagaaaaaaaaaacaaacaaacctgatcttatagagcgcaaaaagaacaaagacctgatcttatagcatcataatcatccattgaaaaaattgcgaaaaaacaatctttctatgggtttcccttcacagaattctccttgtatgctagtgcgtctcttcttttaaaatccaacaacaacttaggattccattataccacgatctccttgtctttagacttacaacttcaatgacgttatcttttactaatattttattttttctcaattgaatcaccattactccagttttctgatgatcaattttgtaactttcagatcctctatgatttttcttttttctctctctaaaatattttaattatttttatttaaaagaatcttctataatttttctttttttcttttttctcaaaaatattttaaatgatcttatcttttagtaatattttttttctcaattgaatcaccattactacagttttctgatgccaagtcttcttgtaactgtcaaatcttctgtaatttttctcttttctttttctcaaaaaatattttaaatatttttatataaaatataaaaataaacccgaataaaattggatatttacataaacattaaaaaaaaaaacacaaatttttagtttactgtgacttgaacatcctaactttcttccaacaaagaactagacacacagatattgaaacagcttttaagaaaatctacacaatcacccaaagcaaagactccttcaaagcacttcttcaattagatgactcctgctgccttctttcacctgctgcaccttggttaacttgttccacttctgcccttcctgcctcataattcatagatgaatcttcggcccatgcaaaccacaaattcaaaattaatgtggcactttgcttcagtaaaaaatagcatacccaaaataaagtaaaaaaaaaaattgtaactcatcttggactgaagtctaaaaccactaggataaaaaatactccacttttttttaaacagttcttacaaaatgaaaaaaaaaagaaacatatagaaaaatatgtaagcatgaccaaaacaagtaaacaaataactgcgattcatcttggaatcaagtcttaagactaacagaaacatacataatcataatttcctttgtttctcaaaacacttcttccaagataagaaaatcgaaaaactgttacaaggcaaatataataaacaaatagagagataataaattttaatatcgatacaaaatatctttgtctagctgcaaaactcaagcagaatgtgaagagtaacaaaagaattagtcagagaagtatggtaaaagaatacaatcaactaatttagaaataagtaaaatttgcaaaaggcattgatcaaacaagagaaacctcatggagacaactagagctactattcattgctatttaccttgtgaagattgattctctgctgggttggtaaaccatgtcccaaccatacctttaagcttatcaaccacacctttccccggactattcacatacatctcttggtactttttctctgtcaccacactttcacctcctaaccttctcttcacttcctctgactcagttacctttcccagtattctttgatgttccattcttctctcaggatcatcgtctctcttatgcacagcatcagaaaccacctttctcacaccttcttcagtaacttccactgggggcagttccttcttgtgcagagtctctgatatcacttcagagagagccctgtcttcatcaccaggcctcagtttgtccaccaaatagtccttcacagaaacccccttgtcctgttccacacccacactactagtttgagttccagaaactttggacttccagctttgactcccgctcgactcgagtgtgtctttcccactcacttttcttttctttttaaccttttttcttttttgaataatgacaataagcaagtattagtctttaatttataaaaacaaaatacataaaactagttttaattcgatgttaataaccaataagagtccttaactcattagtttgagtggttctgaattcatcctctcaaataaaatatcttatttgaattttgtgaaggataaaataatattaagagaaaaaaatgaatactccacttcaaatgataaaaaaatatgacattaatgattattaattacatacatgactcattgttaacccatgaatctaacacacttaactacaagtaacaattagtagtaaataagagatgaatgagacaagttggtaatgagaaaatatttgattattggaaggaataaataagtagtattttctttaattaaaattaatagtttcatttttcactacaatttaatttgatattttttatcgtctttttttttttagttaagggggtaaatgtttgtatgtcacatgaaaaatgttcaacatttgtcattgtaacttgtaagtgtggggatattaccttcttcggagtattcaattcacattacttgaattgaaagttgcagttgattattttttctgacaggtttccttctcaaactagaaaacagtttatggcactgctctagtgttactatacaagtaaacttttcagagaattagggacatattatctgtccaaattatgtaataatacacttaatatttgacatagaagagaggttttaatgtttttaaaagaattttgtcaacaaacgtatcaggatttgatttataggttattaactgtatttgtacataataaatgcaaactttaaggtgtgaattattgagtctcttacatgtccctttccactagtaaaacaccaaaaccttttggattgaagcataaataatgtaaatgctcacctaccttgttttgaaattctactttttattagaaaaatgggggtaacaatgatcaaactctagaccacttagtgcccgtttggtttggtgttcattgttgtgaatgcacgtcaaattgaagcaaaaaatacttgcttttgtgtcatttttaaaattttgactcaaatttcttggacaatgtggatcatggagttagattcaaacatgctattaatcatgcatgttttgatagcatgtcatgaaccaattatatccgctatctgaaaatataatatcagctaaattagtatattagaaaaaagctaaattaacactaactgattactgtccatgtaaatgtaaattgttaagcaatgagagatgttacagtggacccaatataatatctaattctaaaccaaaggatggaattatatacctaatatctttgtgctttttttatgtcttctagaatgcattgtctgcatcaacttgtacacaaatgttgacttgcagttaataattatttttgtcaaatggaggattgttggtgtctcttgaacattgtatcttagcttctatcttttgtctatgcaggaggtaagaatgatttatggccggatgataacattttacaagtaattaatgcttatatgaacccaaaatgtcaccaagcagattcagatattgtgcacaagtaggtttgtcttttttattcatggtttccactcataaagattgattcttaatactgattgaaatatattcaatatactcactaatccgaacatgcgaaaactgagtcaatttacgtctggtattgttaacgcatctcattctctttctagccaagaaaggtcatgcctttctgttatggttcttaatactgactaatgatcaggtataaatgttattttctgaaaacagatatgaagtccatttgaaacagttactgatagcacatgttttgttaaaatttaattaagcttctgagattcttaattggaattttatttttaatgtaacctgatgaattagatctggcatataaattgtatagcactgttgtcagctacttaaaatttactcatctctataggggtcttgctcaatatccgtttcaacgtactaaactccagcagatatgtgttggattctttgagtggccttcagagaaaacaggttcttcgtcttctttgacatattctaatagaacaattcatacctccagtgaaataatttattatagtaacatgtcttaacaactaatttattttgtggtttgggggtggcctgggggcacaactgtgagcacttactactaagtaaagactattttgttcattggtcatgtaatgatttcttagtgatttgaattataaatttgagctgtgctatgtctgtgctggacttttcatagttattttgtgttgctaatttacatttcattaaatagatgggtatatccttccaagtatagctgaaagaaatttacgacgatttgccaatttgcgtttaacttcatctgaagttggaatgaaccttcctttacatgaggtactgctaaccctttccactccctaattaacatttcatttcatgtgtattaataaaagattaaaagttaaaaaagtgtataatgttatacacaatattgctactggatggtgttgcttgaattttcctgttatttctagtttctgcacaccatgtgcttaagccaattttatataatgaaacttttgcttataagaaatattacatacaaaattaattttttcatatccaaataataaaactactttcaataagctagtgtaatcaaacaaaactaataagaagtgtgatacctgggccaataaacgagcattccaatcttgattttcagaaacattgcatttcatgagatattatctggtttgagcaacagctggattacctttccagtaagcataaggctctctgttcagccatggtatcctcgtagtgccttctttcaactctcccaacaaaatatgccatggctttatattaatctctgccctgtgcaccacacatgcaatactttttacttgtttaaaaattaaggtcccgttagagctgattgtgaattttcaattttccgttttaaaatataatttcaaaatacaaacatgttcaacaaaaattgcactaagttaattttttacattatggattatctaattcaaaatttacaagaagaataggcagatcgagatatatattattgaagtgtaggaagaatcagggaagacaatgtccaaggtagcatcatttccacaataccgaaacaagggagttggttgctcaacattagggccattgtaacgatcagacaaaaccacaggccaatccacacaatcaaacataagctccaaatcaggtatcttgccagggtaccttctcaacaattgtagaatcccccatatgctaaaaacatcccttgtttgatagggccttgagtaagtctccaaataagccctaccctttaatattatcaacctaaaataattcttacaagttataaagttgatttgatgataaaaaaaaaaacacagatgggtttgaatcttttttttttctctaacaaaaactaataactaatattgaccgataaaaaaaaaacctaaaatttgccgtttgctttgccctctccaccatgtcttgcgtgatgcccgtgcgggcccatggcctcaaatcctcgtggatccaacggaagtaatctggacacgtggcggtggctggagtgctctgatggtcttgtaggtttgtggggcatgttccggtgaggttgtatgcggtgcagttcaacggggctattggcttccggatggagactgtgaaaggactcgtgccatatggcgtggtgctttgtgctgatttggaagatgatgcaccggaaaacatacgctacacgtacaccacgtgccacacaatgaccacaaatattcaaacaaaccatgcatgcctcatcaaataaaaacaacacccacgtagctccagagtttaactagaaaaacgtatatacagtgctgtaatttgcatgggaacgtaagctttgaaatggttaaaattaagaagctagagagaagtgagaataaaacaagagtgccgttaaaatagcattatttaatgaataatgtaagggtacaacagtgacaaaattatgggtccaagataattctacgtgcatgaaactacaaggctcacgatcccataaagtcaagaattcgttggtcccttctttgggatgtgtgtaaagtttgaaggacatgtgatttacaaaaacttcttacaactcacaacctttggaatttgtctatgcctggttaacccacaatttctggcgcctgttgcggttaggaacatcggctcgcaaaaacactaatcatttcaagagaaatgttaacacacttttctaatatattattttttattttaaaatttattaaaataaaaaaattcagttgatctcatattttatttagcaaatttttctcatatattaagtcttaggtttttaaaattataaagctaaaactaaaatgttttactaaatgtattttaaagtaaattttatacacaaaaatattatgattttataaaaatattacttcaaataaaaagtcttataatttaatactaatttccaactatataaaaaatttaaaatgtaatgttgaatctttcctgagtcgtccgacaataaaaaaaacttgaatccttattcaattgtcttcaagttttagtcaaattgtttggtcaagggagacatattgagccctcctaactataagctaccctgagggtttctatctttcttcttctttttttttttgtttcccacttaattttttactttggcagcaagggttaaacctaccatatctacatgactatgtcttactttccaataagttacacctaaatagctaacatattcctcttgctcacgcacactatatttcgtaaacttttcacgatcatctttatattatcaaattcatttaattaatatacaattatcttaatattataagcaagtctctgtataatcatgtagtgtttctaaattgaatgagtctaaatcacacactcctgaaaaaaaagtcatattgtcaaaatatccgtaaaaagatagaaatactatgttatgggcaagattttgatatactataaccttaatttttacaataaacctgaatgtctaaatatcataactctgaatatgtttgtcggtagcaacttactgcgtgcgactttaacttgtgaataattaatgggtaaaagagtaagtgagaaacgtttttaatggccacacgaatatagttggctaagcgacgaaatgacaatgtgttaattttgtcgtgtcctcaacgatgcgtatgcctcaggccgagggaattctcacacaccattcctaacaatttctaaggaattccacaacgtgtctatgcttcagacaacaataacgtaccaaataaacaagtagcatctaataacgttaaaataagcacacgcatatatcgagccaaccaacgttggaggtagaagaacaacaataatatcaatatttaatttcatttagtattaatttattaggatctcgacgtaaaataataatttattaaaaaataaacataaaatttgaatatttattaaggataaaaacttatttaatttcttttagtgtttaatagtgttttggtctatgtttttttttgtttttttatagttatttcttttcaaatttgatgacattgtcattgggtccttctacccttcacatcagcaaattggacactaaagagactcggtcagaaacaaataactactaggggtacactaacatgagaggatttaacacttttggagtaggaaaacagttaagtgggagcattgactttgtgattgtgagaagggtagatagatagtagtaacattgagcttccaaaaaaaataaaattgtgtgtgtgtgtttctgcttagagtcttagtattgttcaaaggattttgttttgagacaagaaaatcactgaaagattatggatgtgaaaaatggcagcaaatggctttggtagtacacaatggttgcagagtgccaaagaagcaaagcaaaacctgtttcaaaagcacccgggtcagacagtcacagagtggaaaaatggctccacgcaaaccagttgatgaaaacaaaaaaaaaattggtacttctttttcttctaaagttatcatgtcattattattattttaaaaatcaaattaccacaaaaagggtgtttttatgaggcactttttgaaaatgaattaattaataaataatgtagttattagaaaccgggtcttcacgacactaaagacactcggttgatagcacttgcataaacttttgttccttgcatcatctcatgtgtctccattctccattctctgcttccactaacgaataaacctcattgattagggttcaatgatttttcaatgaataaaattaattttaaattcttaattctaacagctcacgtatagtctgttgaatcaaatggattagactcttgatattataaagtatatattacaacatataacaaaattaaaaattgattctttgtgtaaaataaataaatctaattaattatgcttgttatgttattatatcatttttccggtgtggagtaacatcaaaatcaaagtaacaaagttacttgcatgttactctaaccatcattccagctaagtcgaatatggtttcatgttttgttaaataatttagatttccttatcaaagtgtatctgtcttttacacaagttttttcactttattttatttcccccagaatcaattgttatttatactattaaattattagttcgataactaccatgtcgatcattgttaattttgtttcctccattgttccgagtacgcatatactatttactttacgattaaacgtgttacttgcagataaaaactctttataatgaagtacaattgtttatatctacaacaattatagagtcaattaaacactcatcaaaggcagaaaagctttactttaacattagatagaggctcataccaatcatggcggtggttataattacacacatcagcaactgtaaaagatcttgctcggccacagaaaaaaaatgcttgatgcacatctgataaactcactcaaggtatatgtattgatagtttaaaagagagactgaatattaaatgataaaaatataaaataattgttttgtattggaagagtacacatatatatgcccaaatgtagattcaaagttcaaacattttgggcctatagctagaccatcctcctagtcatagccatctgaattggatcgaccccaccccaaggtttgtgttgcatcacctgcatgctttcacctacttttagaacgttattgtagcttttaaactatggccacagaagttgttatagttttctcgtgactttctgtattggaaaatactagggacagatataattgatacaggcataattaattattgtcatgttgctattacgaagactcctcaaagaatatgtttagtaaatcatgatcaagtagaaattgcaatggcaaactgttttttaaaatcttattagtcagtggtagatcacccgcgtttaaacccaaatttagttatatcctggtatgttatattttccatttaatttagtgctctgtttggaaatttgcgtgtcgaattgttttttatacgtacctacccaacactctttggccaaataccactgttcatggaggaatctgtcctgaaaggagtatagaaccagaaacaatatgcgtggtggtatctatcattctgaaaaggagaaaaaaagcgggatacgtacaatagtaggactgtgacactactagaaaaatctatgcacctttcatgtaatgtccctaaatttatgaacaaaagattcaggtgtcgtttattgaatttgttttacatggagtgtaaagtcatatccaatactaagtgtatgtttatataattctttttagaataaatactcttctttatttacaactgataaaaatgttattacattaatttttaaaataagctaaatgaagcatgtttcataagaaattaacttttactgtaattgttacattttttataacaaagaaagatgggtgaagacggtgaaggaaaaaaaatgaagataatgtctatgttgttcaaataacagtattaattgtattaaaatagttaatattaaaaaatatattagtaaatataacattgttgtgttggtgctatttattgtacatcaaaatatgtaaaaataataattaaattaattgtaatttgtataattggtatgggttattgttttatctatgctggattttgttgtatcacacatataatcacttatatatggggctactattgtcctttgcagttgtgtgttgcggttatgattcttttctttttaatcatttttccatttctggttaaggaaggtaaagagagtgagatgccaccaccatggaatttgcttgagctattcagatgatgacgactccacttttttctgagtcagattgctgcacagtgtagagatggcattgcgccacgagtggcagagatttgtgtgacgcttgctgaaaatgaaagaagtggggaggggatgtgcaagttaagggagcaagaagaaagacttgaaagggatggagggtgacaatggtctaaatggaaacatggttttgtttattaaaatatacacggaataaaggggttgtaaaataattaaattgaaacgaaatcaagattatattgggtgtatattcaataattaaaataaaatccttttctcattaccttgttttacactcctttattataacaataatagaattgtatctcggttgcattttactttacatcccttttattataataacgaaaatacagttttgtagtaaaaaaattatgtccccaacaatgtcacaaaaatatgattctattatatatttatataacaaaattatatttccataaaaaaaatacttctggaatttcctaattttctacccacatgggtattgtgaataacattgatggcacgcagtgataatagtaactccacttatatatttatataaaatcctgctctgtacgataaacaaattttgaaaattttcacccataaatggagtcctttagatgtccacacataggtccttctagacttgaatgacaaattgaaaggtaccaaaaaaaaaaggttttgatataataataacatgctaaaaggttaatttgtgtattgtgaattattgattttgtttattatacatcctttttcttcttttttgtcaaaattttaattatttagcagttttacactgacaaaatatttgtaataccttaaaattttatcacatgatttttaggtcataacccaagtaagaaatcatatgattattacatcgtttaacagtgattttttttttatgaaagtgactaagcaatgacaaacagaaatatagattaagaccgcccaaaagataattgagatactaataataaaattcgtagaaggatgaagaactaaaagttgataaaattcaaattcttaaccattcatttaaagagttagaatctgtcactctattcagaccaatcagtactaaagaacaatttatatatattaaccaaaaataatgaaagctggctacactggttttcaatgggaagagtccgagagaccacttccagcattaaaattttgtacaaaacagaatacataaattaatgacaccttccatattggtgtgtagcgcaacatccttattacaaactaaacacgcattaagcatcaaaatacactcatttaaattatttcttgcaagcattaagaaaaatactactacttagtattgcgggaatggagcaacggcaggttcatctgagagctccatagcatcaaaaggttgtggagaaattgaggtgaattgaagagagtgcacaggtcctggagccaccatacctgagcttttgatctcacccatttgtcgacgagcatttgcacaatttgggaagaaacacacctgtgcatacatgaaagacaaaacttataatttattaataatttattagacaatttataatcatatatcattgtgtgttcagttcagggtttaaataacatttttatatgtgtaagtgcatgtatattatttattgagatattttatttgaatttttcattaaaaatactaaatttattaacatgatatgtgcctcgttagggcagtggtttaattaaatctgatagtgagaactgaattgacggcagattccctttactgtgaaaaaaaaaaagattgtatttggaggggtccatatgtgtgatgaaagagttgttaattaccacttttatatataaaaaactagttaattactactgctactggtaaatataacatttttgtgttggtgctgttttttgtacatcaaaatatgtaaaagtaataattaacttgtaatttgtatagttggtatgggttgttttatctatcctgcattttgttgtatcacacatataatcatttatatatatatatgggctactattgtcactaccaaaaatgctattgagactaccaaagcatttgaaattacttggttatccttagttccatttccccacacctcctatccttcccctctttacgttcagctactctccctctttacatccaaaaacagaatttaaataaggctctcaaatttgaaaaaaaaaaaaaaagatagcaatgactacaaattgatcaacctgccaatacaatgataaaacatcggtgtattctaagcaacactaaacagtgataatacctgagcgaaaagattgaagtttgaaccacatgatcaaggaaatgaaaataggcataccgccaagatctacaaatcagcaaaggagcaatcactatccagaatcccagaataaatccaattgtcgcactaacaaaaaaccaattcactccatgcccatgacttccttcataactatgagttttcccattggagctgcagtttatgggcagtggtggaccacatagattgttgccgataaagctggaggcatcaaaggtttgcaattgagttcctgttggaatttttcccttcaaatgattataagacaagtctagcatggtcagaaagctcaaattagaaatggttggagggatttcaccagaaagttgattcctcgaaaaatcaatggattgtattgatctcatattaccaataccttctgaaataggaccaatcaattggttgtgggacaagttcaaaaagttcaatccatttagatctgtgatttctctaggtatttctcctaataatttgttacttgacagatcaatgcttgttaccaaacccagaatgttttggtactcatctcctcttcctttcagccatagtagcacactaactatagtagatccggaattgtaagttgtactattttgtgctacagaatagatacgaggatttctactttggttcattagtgtcatggcactcaagttactgaaacagctcggtatattgccagacagattgttttgtgcaaggtctaaaacctgaagaagactcatctgacatatttcatttggaatgtgaccaacaaaactgtttgattgaaggcggagaattttcatatttgagagcttttctccaacccatgttggaatacatcctgaaagattattttctccaagatccaaggatatcaattggttagtcttcttcaaactggtaggaaatattcctgagagtgtgttgttacgaatttgtaaagactgcaggtctgccaaggaacccatggatggggggatgttcccaacaaaatggttgctgtgtaaattcacttccactagaaatggccaattcatccaacaatcaggtatttctcctgatagattatttgatgcaagattgagaatttctaattgcattggtttgtcctgattgttacataaaaaatcttgcatggatccagagaatgaattggttgaaaggtctaacctatacacagcatttgaaagatagggtaatttaccacataaatgatttgtgcttagatcaacagtttggatagatattggattttttattgtagtcacaagctcaccacggatatgattatgagagaggtttaaatacaaaacctgagaatgtgcttcccagaaccaagtgggaataaaatctaaaatccccgtgttagacagtccaacatattgaagtttgttttgtgactgaatccacgacggaaagttgggacctatctgccatgatgtcacatccaaataggtaagttgaaaattaggaatccaattaggacccacttctaaagtgaaattgttccctgatgcatcaaacactgtcaagcttgtaagatttgcaagatcatcgtccttgacaactccttgaaaattattgccatcaatccaaagagatgacaatttagagagtgatccaagactttcaaatggatttccactgaatttattaatagagagatagagatattttaaatctatctcccttgagttgcggagatttcccaaaaaagtcggaattattccgtcaagttgattatatgacaaatcaagttcaacgagagaagtcaaatttcccagggcatcagaaatagtcccatgcaagttgttgtcccctaggttgaggagcttgagacgatgaagaccgtataagcaatcaggtatagaagatgagaatgaatttccagacaagtcaagattttgaagaagtgtgaggtttcgaataccaccaggaatgggaccttggatttcattatccggtaattgaagagaaacaagtttcttcaatttgaatatccacttggggacaaaagaaatggcaggggaataactagtagcggaaagatggagagtttgcagagatgagaagttgagcaaggatggttcattatagtgagggagtgtgcagtttgataaatataggtgggtcaaagaaggaagagattggagagtgtgtagccaatgaaatgctttggataggtttgcataactcaaatcaagatattcaagcttccacatacttgatacccattctacattttcagcaaacagaggttcggaaaaataatttccgaggtcaagatagaccaaattggagagattcccaatctgagatggaatcttccccatgaatccagtatcagagaggtcgaggtgagtcaaggagctcattgcaccaaggaaagaaggaattgccataccttctccaagtaaataattgacgctcaagtcaagatatcgaagcttagagagattgccaatctgagatggaatctttcccatgaatccagtataagagaggttgaggtgagtcaaggaggtcattgtcccaaggaaagaaggaattgacatacctttttcaaggaaataattgccgctcaagtccaagtaattcaaatgctttaaatcagccaaacaaggacttatctctccaccaaagctccatctcctataagcttcctcatcggatgcaatgtagccatcatcgaaagcagaaggtgaactgtggaggtgaagctgaagaagatgggaagtaaggttgtggcagaggactccataccagtggcaacagttggtatgattatgattccaagaccaaagcctatttgaaggatcattcagactattcttaaacttcaaaagtgtctcacgctcacttgggatgcacacactctctctgcatggtaagcttaacaaccaaagctggacaaagacaagaatataaataatggaggaattcatgatcacacaagaatatatagaaaacaagtgtacttgttggttctgcatataaatcatcaaacttctattatttatactgctgccctgcctgtttttttcttcactcttttttttattattgtgccaaatactaaaatatatttttaaaactttaattcacttcttagaacggtttaaattaaaaaaaaattaggaaattttatttttgacgtttccttttttaaaattttaattcacttcctctttttttacgctgacttttttaaattatcgacttaattatccaattctcccgaattaattcttagaatacgaaaaattatgcatttattgtatctatctccttttttaaaattcctatgtacactaaattcataaaaaaatcaaaattaataacaaaaaaatatgatttgttcttgagctcaatactaaaataagaaaccttctttttggtacagttttttttacaaaaataatgtaaaagaaaattgttttctaacattcttgtgctcatatgaagttccctgtcattgacaacaaatgtactatttcatgatatcccaccccatagcccacaccatcaagtccatctcaaggttttccatttattcatcttgaacctttggacactccacaaagtccagccatgttatggtctgacttcttcaatataatactcaccttcaatataatattctaaaaaatactcaccttcaatataatattctaaaaaataaattcatacaataacttaaacaatctacaaagaaatataatttattcttgtgccaaatactaaaataagaaacattttttattttagtttaccgtatagaatttcttaaatcaatgaaaattttgatttaagaaaatattaataatttttttaatattttgagtagtttagttacataaaaggtaattaaatttagcttaattcttcttcaaattttaactattatttaatgaactgctttacacaaaagtgtgcatgttgttcattgataatgagcaatgaacctttttacttgtcagatatcttatttgatttatgagatttcttgctgaaaaaggatttgaaatttcatgggatttgatcttatatagaactttagactgaattactttttgcctcacaatggtaacaaaatatcttttgtctttgaattttttttggtggttatagaggtatgagattgtcaatggtgtggtagaggttacacttgtgttaagtaaataacaaaaagtcttgcattataaaattcaaatattctattacttgcaatttcaacccataattaattttaaactatcaaatttttattattcaaaataaaagaaatgaaaaacaaaattttctcctagacaaatcgctggccactccaccaaatccatatcaaggtccccacttttccaacttgaaccatagactactccatgaagtccatgtgaaggtcctccattttttcatcttgaacctttggacactccacaaagtccagccatattaaggtctctgacttcttcaacttgatccatatcccataggtcactccaccaatttcatgtcaatgtccccccacttcttcaacttgaaccatattggacactatattaccttcatatcaagttccttatcattgacaacaaatgtttagaattaagcaatgaaaaaattataaatgatgaatacatcaattataggaaaaggatctaaatttaaagactatttcagttaaaaaatctatataaaaaaagactattttgttccaatctagctatttaattttgatccattttttaattcacaaaataatattcttcttatacatgaaaaaagactaattttcactatcatcaattggaaagattgttctgtcaactgattctaattttattttaacttgaatattatttactttttcattaaaaattaattagtgagatacaaagaagtctaaaatgcttgtttaacttggtctatcataattattgacatcataatttttccttttataagtcttggtccaaatttctccatgtattgtagatcatatttaacttaaaatgtaaattagagtatatgatctaccaagaagtgtggcatatttttaaaattatttatccatggtcctagctattctattgttagaccacaggtcttcatatattaaagtctttgcctgaatttcttttacttgtggggtgatattttaagaatagtgatagaagagaaaaaataaatttacaatttattgaaatatccaacttatgaagatttacattcatcatgcatacgtttttcagttttcattatcattttggaaaggttgtttgtgttaattgtctatttctaattaatttgaaaatgaatattaattattttatcacaaaaatttgtatcatattttttattttcttcacaagttatcagcttaaataataggagcaacataattttaatttccattttactttttaaataattttaagtgccaaatttaagctatcataaaaatactcaccttcactataatattttaaaaaaataattcatacgataacttaaataatctacaaagaaatataatttattcttgtgtcaaatactaaaataagaaacattttattttcttagtttaacgtgtagaattgcttaaattaataaaaaaatttattttaagtaaattttaatatttttataaaaaaacattagtagtttacaataaaggtaataaaattggtttaataatgagtcttcaaattataactattatttaaatcaatccttttgttacatgtgtaataagtaaacaacaaaaagtcttgcattattaaatttaagtctattactacatatttgaaactataattaatttaaattatcaaaattttattattcaaaataaaataaaagaaaaaatattgtgttttagacaaaccgtagacaactccaccaaatccatataaaggtctccacttttttaacttgaaccataggccactccatcaaatccatgttaaagttttttatgactgacatcaaatgttgagagttatgtcaagcaagaaaaaaatagactgaaatatatcattttcgttcctataaaattttaatgttattttttttttatcctaagctaagtttggatgagtgataattatcatgtattcttagattttggtgtcattttaggacatttatgtgatgtatatctcttatgtttttttattgccatgaaccaatcttctcttagagtttgtatgattttttattcaattgtaatagaaaaatttctttgagctgcgaattggagagaacactcaataatttttatgtctagagatagttgagcatcaacaaatactttgttttgatgcaaatcgtttgattatggtaattcaagggattaataatttaatcaatggatttgggtctcttcacttaaggaattaatgttaagacaatatgatagattaatgataatatagcatttattaaatataaatgtgagtgattacatgataagaactccaataaaattaaacctgaataaatttttcattgatttaatcagtgtttgttaaaattcccaaacaaaaagttttcccttatttttttcatttatttccttccttaattttcttatttttatttcttcctttaatttctttatctttatgcatattgttatttagattgaattagctaatcttcattaatttcaaatattcatagtgtagaaatttctttatctttatttgtagtgcagaattattggcaggaacccaactttgatctcaactgcaaccccgtcataaaacctaacaactgtgatcaatccaactgcgaatccactggtgcaacctagtgaagcccatcaaacagtttttcttttcttgattttgtgatttgattttttgttgttaagattttgttggtttatgtctattctttcatctagcttgttttcatttagtccacctactggggggaaaatgaaacaccatctgaggaagatgatgggtgatgtagacaaatagaaaatagaagaaagaagaaaggagcaatacgacatcgtttttattttttattttttttaaaaaaatttgcacgtgtaatcccgataatcccaaacagacaaagaatacacacgagtgacatgcatcatggccgattaacaacatgtggataaataatgattttgaactaacaataaagatctaaatttttttttcaaatattagaaatctgatctgaaaaaaaaatgaatatttttcgagggccaataagcaataaaaaatgatgctttttaacccacaatatgaaggtaaacatgtggtcaaaatgtatatacttaatagaaaataaacatttggatagcatacatacacgaattcatgaaaccaaaaattaaatgagaaagccaaacataacaacaaatgaacgagggaaaagaaaaaaaaaaaggaagaagaagaacaaacctgatcttatagagaaaaaagaacagggacctgatcttatagcatcataatcatcttttgaaagaattgcgaaaaaacaatctttctatgggttttccttcacagaattctcctttttttctccgtccccctccttgtatgctagtgcgtctcttcttttatattccaagaacaatttaggtaatattttactttttgctcaattgaatcaccattactccagttttctgatgatcaattttgtaactgtcacatcttctataatttttcttttttctttttctcaaaaatattttaaatttttttatttaaaagataaaaataaacccggaaaaaattggatatttacataaacattaaaaaaaaacacaattggatttttattttactgtgacttgaacttcctaactttgttccaacaaagaacaagacacacagatatagaaacagcttttaagaaaatctacacaatcacccaaagcaaagactccttcaaagcacctcttcaattagatgactcctgcagccttctttcacctgctgcaccttggttaacttgttccacttctgcccttcctgcctcataattcatagatgaatcttcgacccatgcaaaccacaaattcaaaattaatgtggcactttgcttcagtaaaaaatagcatacccaaaataaagtaaaaaaatatgcaagcatgaccaaaacaagtaaacaaataactgcgattcatcttggaatcaagtcttaagactaacagaaacatacataatcataatttcgtttgtttctcaaaacactttttccaagataagaaaatagaaaaaatgtcacaagacaaatataataaacaaatagagagaaaaaatgtcacaagacaaatataataaacaaatgtcacaagaaaaaatgtcacacctttctcacaccttcttcagtaacttccactgggggcagttccttcttgtgcagagtctctgatatcacttcagagagagccctgtcttcatcaccaggcctcagtttgtctaccaaatagtctttcacagaaacccccttgtcctgttccacacccacactactagtttgagttccagaaactttggacttcacaccacttcctacaccagcaacttttccagaaactggagctagtttctctgtcagagactgagcaacactttttccatattctgtaggagcagcagcatggtcagttctcttctcttgtggtgttgttgttgctgtgtcaccaaaaccaagcttcgaagctacggtgtttttggctgagaaagctttatcagaggttgctgatgagatggttgaaggtttctcattgcctgtgttctttaattgattccttgtttgagtggtttgagttgtttttgtttcagcgttgttgccatatccgaggttggaagctacggtgttttttgctgacacggctttatcagctattgcaagctgttgctaaagagattgttgatggttgtgtgttctcttgatggcttgcttgagttgtttcggtgttgttgtcagcgtatccgagcttggaagagactgtgtttttggctgatatggctttatcagctattgcagaggttggctgatatggctttatcagctagtgttagcaataacattggtattggttagttatgcaatgggagattcagctcaagacaaacagagatgtgcagaatccctgacaggtgttacaacgtgtctgccatatttgggtggtgacacgaaagcacccacagcagattgttgcagtggtctcacacaagccatgaagaccaacaagaagtgtgtctgccttattctcaaagacagggatgatcctgaccttggcttaaagattaacatgacaattgctgttggatccactgcttgataattggcaggagcatatatacttgatatgtactttgtgggaatgaggatcttcttccaagtccattggtccctcaaaattgactttagcatgcactgctttctctcacccagtgacctaacaaaatgttcaagttgggtttgtgggtcttctcggattaattccattagttggagaaacaattactacaactcttgactcgtgatgaaatcaataataggaaaaacaataaagatattttgagtgggatagagtaagacagtacattatcccacaaagtgatataataattcattacattaaaaattaacttccaccaaagctgaaataaacaagtctaggctgtcagtttgatgattgagaagagtctaaaatagcatcaggaagataaggaaacaaaaaatggtgaaaaaactaaataatacgaaaaaacttcattatgcagaacaaagacagagtaaaattcgtcctcatttctatctctgtagtcattcccatggatgagggtaagttcccaacaaaatggttgctttgtaaattcacttccactagaaatggccaaatcatccaacaatttggtatttctcctgacaaattatttgatgcaagattcagaaattctaatttcatggattcagagaatgaattgcttgaaagatctaaccgaaacacatcacttgaaagataggataatttaccacataagtgatttgagcttagatcaatagtataaatagataatggattctttaatgtagtcccaagctcaccatggatatgattgtaagagaggtttaaatacaaaacctgagaaagtgcttatcacatccgtatgagaatagaatctaaaatccccgtattagacagtccaacatcttgaagtttgttttgtgactgaatccatgatggaaaattggcaccttactgccaggatctcacatccaaagaggtaagctgaaaattaggaagccaattgggacccacttttaaagtgaaattgttccctgatgcatgaaactccttcaagcttgtaagatttctaagatcattttccttgacaactctttgaaaagattgccatcaatatgaagagatgacaatttagagatattcatgagatgacaatttagagagtgatcaaagactttcaaatcgatttccactgaatttatcaatagacagatcaagatatcttaatgttgaaagttttccaaatgatctagaaagggcaccaccaattgagttgttgtaaaaatctagcatgtcaacatttttaaaaactccaatttaatccgtcaaattgggttattttatcatctagggacaagttttttgtgttttttttctcatgtgggtacttttcaaattatgctccaaaagtgaataagtggtattataacatttaagttacaagtcttaacatctattatgacttatatatggggctactattgtcctttgcagttgtgtgttgtggtcatgattcttttctttttagtcatttttccatttctggttaaggaaggtaaagagagtgagatgccaccaccatggaatttgcttgagctattcagatgatgacgactccacttttttctttgagtcagattgctgcacagtgtagagatggcattgcgccacgagtggcagagatttgtgtgacgcttgctgaaaatgaaacaagtggggaggggatgtgcaagttaagggagcaagaagaaagacttgaaagggatggagggtgacaatggtctaaatggaaacatggttttgtttattaaaatatacacggaataaaggggttgtaaaataattaaattgaaacgaaatcaagattatattgggtgtatattcaataattaaaataaaatccttttctcattaccttgttttacactcctttattataacaataatagaattgtatctcggttgcattttactttacatcccttttattataataacgaaaatacagttttgtagtaagaaaattatgtccccaacaatgtcacaaaaatatgattctattatatatttgtatgataaaattatatttccataaaaaaatacttctggaatttcctaattttctacccacatgggtattgtgaataacattgatggcacgaagtgataatagtaactccacttatatatttatataaaatcctgctctgtacgataaacaaattttgaaatttttcacccataaatggagtcctttagatgtccacacataggtccttctagacttgaatgacaaattgaaaggtaccaaaaaaaaaaggttttgatataataataacatgctaaaaggttaatttgtgtattgtgaattattgattttgtttattatacatcctttttcttcttttttgtcaaaattttaattatttagcagttttacgctgacaaaatatttgtaataccttaaaattttatcacatgatttttaggtcataagccaagtgagaaatcatatgattattacatcgtttaacagtgatttttttttttttatgaaagtgactaagcaatgacaaacagaaatatagattaagaccgcccaaaagataattgagatactaataataaaatttgtgttggacattttagtgtaattgatctctttattatgttaaaataagagtgcacgcttgttttaatgtaataacgagatgttcggtttaggcaaaggttggaagttacatggaagttactaaaacttccatcaacggttggaagttacatggaagttactaaaacttccatcaacggcaatttttaaaaataaataacttccatcaaccgccaaaaaccacctgttctttgattataaataatcatcctggttcagaaagcataacatgtgaaaaactcacaagaccaaaacaaaactcttgaattataatcttctgattttatccgattgaacaattttggttgaaccccgaaatttgattcaatctgaaagtgtttatacacgacttcagatttatccaggattatctcgattttcaaaattaaccaacaaaagattgaatcaaatctttcgagatgacgaacgatagttcgaagatgacaagcaagtttgcgaagttggacaagtttgaagggcaggatttcagaagatggcagaagaagatgcactttctcttgacaacattgaatgtggtgtatgtgctgagtacaccgatgccggtgtatatggaaggcgaaactctggatcaaacaaggaagcgttcgaaatgggagaacgacgattacatttgtcgtggacacattctgaacggtatgtctgactctctctttgatatttatcaaaatgttgagtctgctaaggaattatgggactctcttgaatccaagtatatggcagaagatgcctcaagtaacaaattcttagttagtaatttctttaattacaaaatgattgattcgaggcctgttatggagcaatataatgaactgctgcggattttgggtcagtttactcaacatgatttgaaaatggatgaatccattgcagtttcatctataattgataaactgccttcttcttggaaagacttcaagcataccttgaaacatatgaaggaagagttgactctggttcaactcggtagtcatttcatgattgaggagtcgctgagggctcaggaaattgacaaagtcaataataaaaccgtagcaggttcctcttccgttaatatggtagaggaaagtggaacagttaagcaaaattacaatgctaaaggtaacaaacgaaaatttcaaggaaataagaacaaaggtccaaacaaacagacaaaattgtcatgttggaagtgtgggaaacctggtcatttaaagagggattgccgggtgttcaaaggaaagaacaaggctggtccaagtgggtctaatgatcctgaaaagcaacaaggtcagattgtagtgaataattttaattcgaatacgaattcaaattatgtatcactaatatctgatgcattctatgtgcaggatgatgacgttgcttggtggtttgattcgggagcaacaagccatgtgtgcaaagattgtcgttggttcaaggaatttagaccaatcgatgatggctctattgtgaagatgggcaatgttgcaactgaaccaatcctaggattaggttgtgtgaatttagtttttacttccggaaaaagtttgtatttggataatgtcttatttgtacctggtattcgtaagaacttattgtctggtatggttttaaataattatggtttcaagcaagtacttgaaagtgacaagtacatcttgtcaagacatggttcgtttgttggatttggttatcgttgtaatggaatgtttaaattaaacattgatgttccttttgttcatgaatctgtttgtatggcctcgtgtagttctataactaatatgacaaaatcagaaatttggcatgctagattaggacatgttcattacaaaagattaaaagatatgtcaaaaacaagtatgattcctccttttgatatgaacattgaaaaatgcaaaacttgcatgttgaccaagatcactaggaaaccttttaaggatgttaaaagtgagactaaagtcttagaccttattcatagtgatttgtgtgattttcatgctactccatcattaggtcataaaaaatatcttgttacttttattgatgatgcatcaaggtattgttatgtatatttattaaatacaaaagatgaagctcttgataaatttaaaatttataagaaagaggtagaacttcatcaaaatgggctaatcaaaactcttcgtacggataggggaggtgagtattatgatccggtttattttcaatctactggaataatacatcaaactacagctccctatacaccacaacagaatggtgtagccgaaaggaagaatagaaccttgaaagaaatggtgaattccatgttatcctattcgggtttaagtgaaggattttggggtgaggctatgttgacagcctgttacttgttgaaccgaattcctaacaaaaggaataaggttaccccatatgaactttggcacaaaaagacaccaaatttgagttatctcaaaatttggggatgtagggctgtagtcaggcttacagaacctaaaaggaaaaccataggtgaaagaggtatagattgcatatttattggatatgctgaacattctaaagtatatagattctatgtgctagaatctaatgattctgttgctgtgaactcggttatagagtcacgggatgctatctttgatgaacaaagatttacatctatacctaggccaaaggacatgaattccatgtcgaaaatctcagttaatattgaggatatacctttaactagtactgaaactagaaagagtatgagagtaagaaaagctaagtcatttggtgatgactttcaactctatttggttgaagggtcaaggaatgatattgaatttcaatatcaatattgccttaatgttgaggaagacccaaagacttttagtgaagcaatggcttcaagggatgctgtattctggaaagaagcaatccaaagtgagatggattccatcatgcaaaataatacatggaaattggttgacttacctcctggatgtaagccattaggatgtaagatgatctttaggagaaagatgaaagtggatggtactgttgacaagtacaaagccagattggttatccaaggctttaggcaaaaggagggtattgattttttcgatacatatgctcctgttgctaggatatccactattagactgttgttagcacttgctgctatccacaatctgatgattcaccaaatggatgtgaaaactgcattcttaaatggtgaattggatgaagagatatacatgaaacaacctgaagggtttgttatgccaggaaatgaaaataaggtgtgtaaactgatgaaatctctttatggcttgaaacaagcgcctaagcaatggcatcaaaaatttgatgaggttgtgttgtctagtggttttgttataaaccaagcagataaatgtctatacagcaagtttgatactcatggcaaaggagttatcatttgtctgtatgtagacgacatgttgatctttggtaccgaccaagatcaagttgatgaaactaaggcatttttgtcttctaagtttgatatgaaagatatgggggaggcgaatgtgatcttaggaataaagatcaaacgtggaaacaatggtatttccatctctcaatcacattatattgagaagatattggagaaatttaattttaaagattgttctccggtaagtactcccattgatcctaacctgaagctattacctaataaaggtgtagcagtgtctcaacttgaatactcaagggcgataggatcactcatgtatgcaatgattagtactaggcctgatatagcttatgctgttgctaaactcagtaggtttacaagtaatcctagttctcatcattggcaagctatgaatagagtattcaagtacttaaagggaaccattgactatggtttgacatatactggatttccttcggttattgaaggttactctgatgcaagttggataaccaatatggaggattattcatccacaagtggttgggtattcctccttggaggaggtgctatctcttgggcatccaagaaacagacctgcattacaaattcaacaatggaatctgaatttgtagctttagcagcagctggtaaagaagctgagtggctaagaaatctaatctatgagattccattgtggcccaaacctatacctcccatgtctatcaggtgtgatagtcaggcagctttggctaaggcatatagtcaagtgtataatgggaagtctagacacttgggtgttagacacaacatggttcgggagttaatcatgcatggtgtgatatcagtggagtttgtgagaactcagcataatttggccgatcatttaaccaaagggttaagtagagatctcgtgaaaaggtcggctgtgggattaggattaaagtccatatgaaatctcttatgttaagatacccaattcccatctaatatgacattaggtgctgaattcaatgtggaaagcttaacatatagagattggaacacatcatcgaaagtatcccaaaaggaatgtgttcggttctgtaagttaaggaggttgaagtataacttctcaatggttcttttgaaaaattgcatttgcaggtgcaagaaagaaaaggactacctatataagcatgaagtttagccgcttcaagaagctgggacttggctttgatatgcttatgaaggatagggacacaggctagtaaaactagtgtcgagcaagagtaatgttataaactattgtggagattatcttcatgtattcattatgaatagaaagggttcaatccttagtgacaccctgatattcgaatatttgaaacgtgtaatttgctaagatgaaattcaatcgtcacgatatttcatctatgcagtagtttgtggtatgttatgactttggtgatttgatcggtaattacactaaaatgggggaggtttgttggacattttagtgtaattgatctctttattatgttaaaataagagtgcacgcttgttttaatgtaataacgagatgttcggtttaggcaaaggttggaagttacatggaagttactaaaacttccatcaacggttggaagttacatggaagttactaaaacttccatcaacggcaatttttaaaaataaataacttccatcaaccgccaaaaaccacctgttctttgattataaataatcatcctggttcagaaagcataacatgtgaaaaactcacaagaccaaaacaaaactcttgaattataatcttctgattttatccgattgaacaattttggttgaaccccgaaatttgattcaatctgaaagtgtttatacacgacttcagatttatccaggattatctcgattttcaaaattaaccaacaatttgtagaaggatgaagaactaaaagttgataaaattcaaattcttaaccattcatttaaagagttagaatctattactctattcagaccaatcagtactaaagaacaatctatatatattaaccaaaaataatgaaagctggctacactggttttcaatgggaagagtccgagagaccacttccagcattaaaattttgtacaaaacagaatacataaattaatggcacattccatattggtgtgtagcgcaacatccttattacaaactaaacacgcattaagcatcaaaatacacccatttaaattatttcttgctagcattaagaaaaatactactacttagtattgcgggaatggagcaacggcaggttcatctgagagatctacatcatcaaaaggttgtggagaaattgaagagagtgcacaggtcctgcagccaccatacctgagcttttgatctcacccatttgtcaaccagcatttgcacaatttggaaagaaacacacctgtgcatacatgaaagacaaaacttataatttattatacaatttataatcatatatcattttgtgtgttcagttctgaaaatgttttttagatgcgtattcataaaagataaaaataaatacaaaacaaaagtaactacatacaatattagatcaatttgtttttgttacaatataattcatgcattcaatgataaaaaattagaattatttttagttaattagcaatgtaaaaattgatgttgtgttatagttttttatttttaaatcacaagtattttttattaaagataatctatttgttcaatagaaatagaattatatagatgatagttttgtatatatataaatatttaatgtaattatataattaaaaaatgaagggaaaaaatgaagataatgtctatgttgttcaaataacagtattaattatattaaaatagttaatattaaaaaaatattagtaaatataacattgttgtgttggtgctatttattgtacatcaaaatatgtaaaaataataattaacttgtaatttgtatagttggtatgggttgttttatctatcctggactttgttgtatcacacacacacatatatatatatatggtctactattgagactaccaaagcatttgaaattacttggttatccttagtttcatttccccacacctcctatccttcccctctttacgttcagctactctccctctttacatccaaaaacagaatttaaataaggctctcaaatttgaaaaaaaaaaagaaaaagaagatagcaatgactacaaattgatcaacctgccaatacaatgataaaacaccggagtattctaagcaacactaaacagtgataatacctgagcgaaaagattgaagtttgaaccacacatgatcaaggaaatgaaaataggcataccgccatgatctacaaatcagcaaaggagcaatcactatccagaatcccacaataaatccaattgtcatactgacaaaaaaccaattcactccatgcccatcacttccttcataactatgggtttgcccattggagctgcagtttatgggcagtggtggaccacatagattgttgccgatgaagctggaggcatcaaaggtttgcaattgagttcctgttggaatatttcccttcaaatgattgtatgacaagtctagcatgctcagaaagctcaaatttgcaatgcttggagggatttcaccaaaaagttgattcctggaaaaatcaatggactgtaatgatctcatattacctataccttgtggaatatgaccaatcaattggttgtgggacatgtttaaaaaattcaatccatttagatatgtgatttctcttggtatttcccctaataacttgttacttgacagatcaatgcttgttaccaaacccagaatgtttctgtactcgtctcctcttcttttcagccatagtagcacactaactatactttccatcgaagagtaagacgtaccatgttttccttgagaatagatacgaggatctgtactttggttctttagtgtcatggcactcaagttactgaaacagctcggtatattgccagacagattgttttgtgcaaggtctaaaacctgaagaagactcatctgacatatttcatttggaatgtggccggcaaaactgtttgatcgaaggcgaaggattttcacatttaagaggttttctccaacccatgttggaatacttcctgaaagattattttccccaaggtccaaggatatcaattggttattcttcttcaaactggatggaaatattcctgagagtgtgttgttacgaatttgtaaagactgcaggtctgccaaggaacccatggattggggtaagttcccaacaaaatggttgctttgtaaatttacatccgcaagaaatgtccaattcatccagcaatcaggtatctctcctgacaaattatttgatgcaagattcagaaattctaatcccattggctcgtcctgatcgttacataaaaagtcattcatggattcagagaatgaattgcttgaaagatctaaccaaaacacatcacttgaaagatagggtaatttaccacacaagtgatttgagcttagatcaatagttgggatagatattggattctttaatgtagtcccaatctcaccatggatatgattacgagagaggtttaaatacctaacctgagaaagtgcttcccacatctgtgtgggaatagaatcgaaaatccccgtgttagatagtccaacatattgaagttggttttgtgactgaatccacaatggaaagctgggacctaactgccatgatgtcacttccaaataggtaagttgaaaattaggaatccaattgggacccacttttaaagtgaaattgttccccgatgcgacaaactccgtcaagcttgtaagatttgcaagatcatcttccttgacaactccgtgaaaaagattgccgtcaatatgaagagataacaatttagagagtgatcgaagactttcaaatggatttccactgaatttattcatagagagatcgagatatcttaatgatgaaagttttccaaatgatctaggaagagaaccaccaattaagttgttggaaaaatctagctgcacaatatttttaaatgccccaatatgatctgtcagattgcctgaaagtcgtgaactctgaactgcaagtgttgtgagtccatgggaaatacaaggagcaagaatttctaaaagttcattaacctgttggttgagtttgagatatgataaatctatcacccttaagttgcagagattacccaaagaagttggaatgtttccttcaagttgactatatgacaaataaagttcaacaagagaagtcaaattacccaaagaagttggaatgtttccttcaagttgattacctgataaatcaagttcaacaagagaagtcaaatttcccaaggcatcagaaatagtcccatgcaagtcgcaggaacttaggtccaaagacttgagacgatgaagaccgtataagcaatcaggtatagaagatgagaatgaattgaaagacaagtcaagattttgaagaagtgtgaggtttcgaataccaccaggaatcggatcgttgatttcattatatgataattgaagagaaacaagtttcttcaatttgaatatccacttggggacaaaagaaatggcaggggaataactagtatcggaaagatggagagtttgcagagatgagaagttgagcaaggatggttcattatagtgagggagtgtgcagaatgacaaatataggtgggtcaaagaaggaagagattggagagtgtgtagccaatgaaatgctttggataggtttgcataactcaaatgaagatattcaagcttccacatacttgatagccattctacattttcagcaaacagaggttcgacatcagaatcacctccaaggccaagatacaccaaattggagagattccaaatctgagatggaatcttccccatgaatccagtaccagagaggtcgaggtgagtcaaggaagtcattgtcccgaggaaagaaggaattgacatacctcctccaagtaaataattgccgctcaagtcaagatatcgaagcttagagagattcccaatctgaggaggaatcttcccattgaatccagtatgagagaggttgaggtgagtcaaggaagtcattgtcccaaggaaagaaggaattgacataccttctccaaggaaataattggcgctcaagtccaagtaattcaaatgctttaaatcagccaaacaaggacttatctctccaccaaagctccatctcctataagcttcctcatcgaatgctttaaatgctttgttatcgaagagatagtggccatcatagtcatactcgaaaacagaatctgaagtgttgaggtgaagctgaagaacatgggaagtgacgttgtggcagaggactccataccagtggcaacagttggtattattatgattccaagaccaaagcctattggaaggatctatgagattattcttaaacttcaaaagtgtctcacgctcacttgggatgcacacactctctctgcatggtaagctcaacaaccaaagctggacaaagacaagaatataaatggaggaagaattcatgatcatgcaagaatatatagaaaacaagtgtagttgttggttctgcatataaatcatcaaacttctattatttatactgctgccctgcctgtttttttcttcactttcattattttttaccttttttattattgtgccaaatactaaattattctttcattcttttttttacgctggcctctttaaattatcaatttaattatccaattctcccgaattattctcccgaattaattttgatcaatttttcaattcacaaaataattttcttcttatatgtgaaaaagactaattaatcttcattgtcattaatgattgttgtgttgtctatttctaattgttttttaatcataatattattttctttttattaaaaattaattagtgagatacaaagaagtttaatttgatctatcataattattgagatcatagtttttccttttataagtcttggtccaaatttctccatgtattgtagatcatatttaacttaaaaagtaaattagaagatctacaaagaagtgtgacatgttttttaaattataaaattatggtcctagctatttattgttagaccacaagttttcatatattaaagtttttgtctaaatttcatttatggtgatagtttacgaataggatagaagacaaaaataaatattcaatttattgaaatatctaactcaattaattgatgaatacatcaattataggaaaagggtgtactttaaagactatttctattaaaaaatctataattttttttttccttccaatctaattatttaattttaatcaatttttcagttcacaaaataatattctcttatataggaaaaaaagactagatttaattatcatcaattggaaaagttattgtgtcatctatttatagttgtattctaacttgaatattattttatttatcatataaaaattaattagttatataaaagaagtgaaaataatattaactttttttctcaaaaaaaaatcagtatcatattttatattttttacaagttatcaacttaaataagaggagaaacataattttaatttctattttactttttaaataattgcaagtgtcaaatttaaataatcatgagaatactcacgttcaatataatattctcaaaaaaaaaaatccatacgataacttaaacaatctataaagaaatataatttattcttgtgccaaatactaaaacaagaaacattttttattttagtttaccgtatagaattgcttaaatcaatgaaatttttattttaagaaaatattaatgatttttttaaaactttaagtagtttacatcaaatataattaaatttggcttaattagtcttcaaattttaactattattcaaatcaattctttcgttaaacctgtacgtgttaagtaaacaacaaaaagtcttgtcttataaaattcaaacattctattacatgcggtttgaacccataattaattttaaatatcaaattttaattattcaaaataaaagaaatgaaaacaaaattgtctcctagagaaacccttgcccactccaccaaatccatatcaaggtccccacttttccaacttgaaccatagactactccatcaagtctatgtcaaggtcctccattttaaggtccccagttttccaacttgaaccatagactacttcaaccttaggacactccacaaagtccactaatattaaggtctctgccttcttcaacttctgcaacgcatatatagaaatcaacttaattgtataagtgcttcttgcttctgcatataaattataaaacttctattatttatactgctgcaagtgtctttcttgacttttttaatttttttattatgtttcctttttttaattattgactttattatccaattctcccgagttaattcttagaataggaaataattttgaatttactttatctatctccctttttaaaattcctatatacacaaaattttatattgaatttaactattatttaatctatcctttcgttaaacttttgttaattaaacaataaaagttcaacattttattaaaaaaattcaagttttctatttcatggactccatcaagtcttttattaaaagtccaacttttgttaattcaagtcgtttaatactttaaatcaaaggtaattaaatttggtttgattagtcttcaaattttaactattatttaaatcaatcctttcgttacatttttgttaagtaaatgattgcatagcaagcaaggaggtgcaagcagtaacactctcacaaagataaagatctcaaagccatcatttttttttccttttcttttctatgaactgtcatttcttatctctacatgtgaatgtcatgcagacaaatgatgtccaagctccactttttccattcattgcaagttgtaagcagaatgtagaatgtacgtataataaaataatgagaatgccaactactagtacgtagtacttaattaaaacaaaagtatcaaaattagaacgaaaataactttgatgctgttaatacatgagtttaattttgatacacagtgtaaaaagttaaattgttaattaattagaaatcacctaatgatttgtaaaacaattactaaaaaaagtttcatttgaaacttagtcttccacccgtctcaagctctccacatgaaaaaaaaggttgtttgtgtcatctatttctaattgtattcaaacctaaatatgatttcctttatcatataaaaattaattattgataaaaaaagaagtggtgaaaaagaatttaacttttttctataaaaaatagtatcatattttgtattttttataagttatcaacttaaataataggagaaacataatttttattttcattttactttttaaataattgtaagtgccaaatttaaacaatcataaaaatactcacgttcaatataatattctaaaaaatatatttatacgataacgtaaataatcttctacaaataaatatattttattcttgtctcaaatattaaaataagaaacattttattttaatttacagtataggatttcttaaatcaacgaaatttttattttaagaaaatattaataattttttaaaaactttgagtagtttacaacaaaggtaattaaattcggcttaattagtcttaaaattttaactattatttatatcaattaatcctttcgttaaacctgtacgtgttaagtaaataacaaaatgtcttgccttatataattcaaatattctattacttgcagtttgaacccataattaattttaaaatatcaatcttttattattccaaataaaagaaatgaaaacaaaattgtctagtctcctagataaaccacttcccactccaccaaattcatatcaaggaccccacttttcccacttgaaccatagactactccatcaagtccaagtcaatgtccttcattttttcatcttgaaccttaggacactccacaaagtccagccaaccatatttaggtctctatcttcttcaacatgaaccataggtcactacattaccttcatatcaagtttcatatcattgacaacaaatgtttagaattaagtaagcaaggaaaaaaattataaatgatgaatacatcaattataggaaaatgatctaatttaaatattatttcggttaaaaaatctatataaaaaaagactctttcgtttcaatctaactatttaattttgatctattttttaatttacaaaataatattcttcttatatgtgaaaaaaaactaattttcattgtcattaatcaaaaagattgttgtgtcgtctatttctaattgtattttagcctgaatattatattctttttcattaaaaattaattagtaagatacaaagaagtgtaaaatgcttgtttaacttggtctaccataattattgagatcataacttttttcttttataagtcttggtccaaatttctccatatattgtagatcatatttagcttaaaaagtaaattagaggatatgatataccaagaagtgtggcatgtttttttaaattatttatctatggccttagctattttattgttagaccacaagtcttcatatattaaagtctttgtatgaatttcatttacttgtgtggtgatattttaagaatagtgatagaagagaaaaataaatatataatttattgaaatatctaacttatgaagatttgcattcttaatgcataagcttttcagtttatatattatcactatttggaaatatttgttgtgttaattgtctatttctaattaatttgaaaatgaatcttaattttttatcataaaaattagtatcatattttttattttctttacaagttatcaacttaaatactaataggagcaacataattttaatttccattttactttttaaataattttaagtgccaaatttaagcaatcataaaaatactcacgttcaatataatatttaaaaaaaataattcatgagatcacttaaacaatctacaaagaaatataatttattcttgtgccatataaacaacaaaaaaagtcttgcattattaaattcaagtcttctattacatgcaatttgaacctataactaattttaaatgatcaaatttttattattgaaaataaaagaaaagaaaaaaaaattgtcttctagacaaaccacagacaactccaccaaatccatatcaaggtccccacttttttaacttgaaccgtaggccactccatcaaatctatgccaaagtttcttatcattgacaacaaatgttgagagttaagtcaagcatgaaaaaaaatagggtaaaatatatcatttctatccctataaaattttaatgtgctacttttttttttatcctgagttaagtttggatgatagataattatcatgtattcttagattttggtgtcattttaggatatttatgtgatatatgtcttttatgtttttttattgtcatgaactaatcttctcttttgttggagttgaatataattggttcattttttatgtaatgactattttttaattgaataaagcattctaattgtttctcttctatgtttaatatgcgtttttggcttaatcacctgtttgtatgattttttttattcaattgtaattaaaaaattctttgaactacgaattgcaaaaaacacctaataatttttatgtctaggaataagataaaaagaattgagcatcaataaacactttatcttaatgaaaatcatttagttatgttaatttaagggattgatagtgtaatcaagggatttaggtctcttcactaggaattaaagtgaagataatatgatgggtttatgataatataacctttattaaatatgaatgtgtagttattaggtgatagaaacttcaatgaaattaaaccccaacaattttttcattgatttaaccccaacaattacatgaggtgtttgttaaaattcccaaacaatttttttcctaaattttttcttttattttcttctttagttttcttatttttatttcttcctttaatttctttatcgttatgcgtattgttatttaaatcaaattagctaatgttaattaatttcaaatattcatagtatagaaattatactttttattacccaattatttcctaagtcctgttaatgagtattatagaaaaaatgcatgaatagcaagagaaggaagatgtggaagggtttagaaactgcagaatcctatgcaagctccaacattctacactaattaaattcattcaggcaaattctaagttacatgtgtaaaacaatcttcttaaatccaatcatcgagtgtgtcatttcaggtattttaatgctaatcattgttagtgcacagatagtagaagacaataatgcgtcataaatacaaaacagaatttgatgctcaagtctgaagctcgtctagttctcttaacattaagaacatttattaccaatgaaagcaaaacaaacagacaccccatatgaacatgtacatagtatggtaaaccttttcacatttttaatgtctagaataacacgttgtaatgtctctcactcctaacagttaacatgtaaactcacaatttcccaagtaaccttcttaccttcaaaactattatcacataaatcagatctctcaagtggtcaagataatgaaaataagcacgcctccaagttctgttgaagaaaacaacactgcaaaaaccccaaaatcctgctgcaaatccaactcccataccaatataaaactctgatgttccaaagaaattaccatcaccgtgtccaacagaagcactctctgtcaactcttccttgtctgtgcaattttttgttacaggaggaccacaaagctcaggatttccagtgtagctaagttcttcaaagctctgaagttgggtgctcgtgggaattctgcctgataagttgttgtatgatagattcaggacactgaggaaggacaaatcagataagctttgagggatttgacctgaaatgttgtttagtgagagatcaagggattctaacaatttcatttttcccatgtcatttggtatccctccaaacagatgatttctagacaagttcaaaaaccgcaaagcagatagcttggaaatttcagatggaattgctccagacagcttattacttgaaagatcaatcattctcaccaatatcagattgtctctgtactctaactcatctcctttgggaactaagacaagagtttccttgtagtggttataactgaagtcagagccatatgaataacttaaagggttggcaaagaagtcatcttcaccagccattgtcttcatgtcatccaaacaatttggaatggatcctgacaggctgttattgccaagatccagcactataagggaagaaagttgacacatcttttcagtaatgctgccattgaaattgttggatcttagacgaagaaccattagatattgcatttcccacatccaatcaggtattgcgtcagaaagttggttattgcccatgtcaatgaatttcattgtagagcaattttgcagtgttgaaggaatatatccagagaagcggttgtcgtctaacaacaaagactcaagttgagatagataccccatggagtttggaataacaccagacaaattgttactacccaagttcaaatgcaccaatgcttgccaatgcacccaacagtgaccaagatcaccatataagacattatttgaaaaatcaagcacacttaacttattagtagcattttcctttccacataaaaagggagaaattgttccagaaattgagttattggcaacattcagcacttcaacatttgcagacacacttggcaatgtacccttgaacaaattagaactcaaatttatgacgctggaattgagaaagatgttagataggtctccacttaacagattgtttgacagatccaggaattcaatttgcgaagtccaattccaaaaccaacttggaaccaagtctgcgatacctgccttagacattgtcaaaaccttcacagaactttgcctttttagccattctggaaagttaggacctattccaaaggagctcagtaaaacatattcaagctgaaaaggaggaacccatcctgagttgacactgaggaacaagtttgtccaagacaaacgtagttcctttaatttcaaaagttttacaaaatttgactcttttatagatccttctaacaaattagatgaaaggtctaacatcactaaatttgagagagttccaagagttacaggcatatcaccagtcaaagaattagttccaagatttaatacctgcaggtttctgaggaactcaaaactcttaggaatggttccattcagtcggttgtgagccaggtttaaagttctcaaggatgacaagtttgcaaatggtgagggaattggacaagtaaaggtattattactgagatttagaacttcaagatgcttaagctggcctaatgaatctggaagtggcccactgagctggttgttctgcaggtctagattttttatgttctgaaggcttgatattatttgtggaatttgtccctgtaaaaggttactgtgtaaatcaagttggacaagagttgtgctgagattaaatagccatgaagggatttgctgattgagattgttaattgaaagatcaaggacttggagatgtgtgaagttggcttttccttttggtggtcctaagttatcaatttgacagctctccaagtgtagttctgaaagagatggaagtgcactcagtacttgaagccagttaccttgtttatgaaggtctgaaccactcaagtcaaggtactccaaggaagatagccttgatatccaattaaggttatctatctgaagagcataattgtatccaagattaaggtgctgcaggtttgagaggtttcctagttgatgagggattaatcccatgaacccacttaagctaaggtccaagtatctcagactctccaatgagcctaggaagcttggtattggagtaagaacaaaataatttgaactcaagtccaaacgattcaaatattttagttcaagcaaagaaggactaatctctccactcaactccctatagggagagcccgcaggtgtgtcaagattgatttccatgactttacctgtgttgttgcagtgaacccctggccatgtacagcaatccgatttgtcagaccacgatgaaagcctgtttgaagggtctgctagtccatgcttgaagctgaggagtgcattcctttccttctcgctgcaagtcatattgagccttgctgccttgcttgcactgaagtggagagttgttgcagtggacaatatcaagagaagaacatgagttgcaaatagcactgccatgaagaagaaggaagacgaaaaaggttgaatccacaattttctggttcacggttggtatttactactaacaatgcctatataggatatataccatagaagggtttgcatttaaaattttattccactaatggtggtggttgcaaaatgcacacatatgtagaggtatatatgtctacaaggagacatttaggattaaaagtgcctaaccacaccaccattattttgctctagtttattttattttgatttaattatccttttaatccttatagttgtgataatttgttttagtccctatagtttaagacattcattttggttcttatatttccaattttttttatcttttggtcctcgcggggaagattcaactcacacataaacatgaacaaaattaataaaaatagggaagcaagctcaggtacaaatgaagtgtaatggaggtatgagacaaagccactacacattccattattcttgagtctgccaccgacctctgcaagcttagcatttgccaattgccatgatgtaatctccttcttgacagtctctcatcaagttggagtggtatcacagcattgaactatgttgatcgttccaatgggatgatggttttgattgctgcagataaagtgtgtcattgtgagtttctggtcccatgagttaaactataaggactaaaaaaaatattgtcgtatctttaagggccaaaaggataattaaaccttttatttttttataatttttttttacaacgggttatatatatgtagcagtttattctaaacaatggactacgtgtgaaatctttgaattctatgtaagaaatgttatttcaaatttctcatcagtcttcatgtcaatgatgcatgctccatttgaattctatgtctaattaagctctcggtcttccgtttttgcaactttatttcgtagaaagaagccaaatttgaagatacaacatttgatactataactgtttggtgttttgaaaatctcactgacatatttccaaatgttacaatctcctagccttttttaccaagtcagggaatttgcattgttgtgcatgatggctgccacaaggacccttgtgccaacccataagtgcaagtggttttttcttatgagaattgagaaacaaattatatatgtgttttataaagggaattctattatttttaattttgaacttgtaatgttttttgtttccctcacagaacaagtgatgtgactcttgatcgacgccatacgtacgcctactttgatgctcttttttcacaccacttttatcttaatggtatctcaagttgacaatcataaattaaaatagctaactatagttgattagtagagacaaacagctcaaagataaagatctttaagccatcattttttttgccttttcttttctatgaactgtcatttcttatctctacatggaatgcccagaagttgaaaattacttgagctttctttacctatactgctttccattttggcgaactgcttttctttctcataatgaactttccacttccaatgatggttgaacattaataattcttcatctattttgtctaaaaatttccactcactttttgtgagtggtgtgaatgtcatgcagacaaatgatgtccaagctccactttttccattcattgcaagttgtaagcagaatgtagaatgtacgtataataaaataatgagaatggcaactgctagtactacttaattagaacaaaagtatcaaaattaaaacgaaaataactttgatgctgttaatatatgagtttaattttgatagatagtgtaaaaatttaaattgttaattaattagaaatcaccaaatgatttgtaaaacaattagtaaaaaagttataggaaatatatataattaattaattgcaaatgaaagtgtatttaaattaaattcttaattaacatatccttattgtgatattttgtatattttttatttaattgagacagtggaatgagatcgcactacaattttcatcacgggtgtggttgtctaatataatagggatggttggtgaggaattttggaatgttagttggttttagactatatatcctcttattcagttttcacattctcattagagttaagttgcttttggggaagaaccaatgtcttgaaattccctcttcaccagaagcagttttattgtgtctttatcgaagtcatcttctccagagacttgcctttaactttgaagataggaaatagatcagtcaaacattgtttcagtttatttggatttttttttaaggacatgtgattttcaaagacttcttacaactcacaacttttggaatttctctatgcctggttaacccacaatttcggcgcctgttgcggttaggaacataggctagtaaaaacactaatcatttcaagagaaatgttaacacacttttctaatatattattttttatattaaaaattattaaaataaaaaattcagctgatctcatattttatttagcaaatttttctcatatattaagtcttaggtttttaaaattataaagctaaaactaaaatgttttactaaatgaattttaaagtaaattttatacacaaaaatattatgattttataaaaattgtttggtcaagggagacatattgagccctcctaactataagctaccctgagggtttctatctttctttttcccacttaattttttactttggcagcaagggttaaacctaccacatctacatgactatgtcttactttccaataagttacacctaaatagctaacatattcctcgcacactatctttcgtaaacttttcacgatcatctttatattatcaaattcatttaattaaatatacaattatctttttttgggaaaaaatgtaaattatattaaacccaaaatgatacaataataaacggggcatactccgcagttaaagaaaatcaaaagtctccctaatacaagaagacatatatcaagatgctaaaacaaatgcaacaggtgcgcttgtctatacataagaaacttaatcttgctaataacctctatgacagaaaattgataatcttcaaaaatcagcttgttcctagacagccaaatgcagtagactgtaattgctatagtcagaaaacgtaatttttcttgaacaccaattatcttaatattataagcaagtctctgtataatcatgtagtgtttctaaattgaatgagcctaaatcacacactcctgaaaaaaggataaaaacatatttaatttcatttagtgtttaatagtgttttggtctatttttttttttgtttttttatagttatttcttttcaaatttgatgacaacattgtcattgggtccttctacccttcacatcagcaaattggacactaaagagactcggtcagaaacaaataactactaggggtacaataacatgagaggatttaacacttttggagtaggaaaatgtactttaagaaaagaaaatatatgtttatccatgaacactaagctctagacaaaaaataaaaaaccccgagaaatagtatataactctttagtggacaattggtgttgtacaaaattgaaatgatccagactaagtcaagaaactggtcttcttcattgaactcacactgaaaccacagaatttattttcatctactagtttccttcccaattcccatgttttctaaaacataacacactacagaaccttctaataaattaaaacaaaaaaaccaatattttacatgtagcaccacaacctaacaatttctacctacaactttttctatagactataatataatctatctccactcattcattcatcaagattgagaaatggattcaaatgcttgtctaccacacttgctagtgttagcaataacattggtattggttagtcatgcaatgggagattcagctcaagacaaacagaaatgtgcagaatccctgacagctgttgcaacgtgtctgccatatttgggtgctgacgcgaaagcacccacagcagattgttgcagtggtctcacacaagccatgaagatcaacaagaagtgtgtctgccttattctcaaagacagggatgatcctgaccttggcttaaagattaacatcacaattgctgttggtctcccttctctttgcaaaacacctgataatctctgttaactcgttggcaagtgtaccaaatcgtcacaagtagtaaagttctcggaagtccgagtgtcgaatccacagggactttgtttgtacttagattaatgcaaacccaatttaaaagcaagagataagaaatttaaaatttaaaataaaagataaagataatagataagataagatgaaagaaatttaaaataaaagataaagataatagataagataagataaaagatttttaaaatttaaaataaaagaaaaagataaagtcaagataagatattgggaactgacttgcctaacctgcctaggatgtatgagtttatgatttttctttaccaattcaggtgattctatcccacccacatctattcatttacttgtccctgatgcctcacgatgacaagcctattttacctatctatcccccaaatgcctttgcaaagacgcaatagataaaatgcatgaagttctaattctagatgtttgctttgacgcatgggcataatgcaatcactctatgcctagcaatgattttattatgatatcttttcttcttgttctattagaagttatcctctcccgagcgtctaaccccctaaaactaatgcatgcatatcttctttaaatcttatttagaagttaccctctcccgagcatctaacccctaacagaatataaagatgagtatgcaaggtaaaaacagaaaagaaaataggaaagaaaaacctggtattgcattgataaatagtgaagagtacatcatacatcgcattggtttctaggcctgccagaccctaactaagggtttagccactcatggccattgaggactttacaatgagaaggggtgaaagaaagggagtaagtgaaacccctaggagagggggttctgtcgtggtgtgttctgtcccttggactggctctctatttatagctgctgaagtgggctttgggccttcgtaggcgcgctcagcgcgacaccccctcgctcagcgcgtgtagatcgcgcgcttagcgtgcatgttgcaggcttagcgcacgcttctgttagatcgcgggcttagcgcgcgtgttgcaggcttagcgcacgcatctgttagatcgcgggcttagcgcgcgtgttgcactgggcctgcttcagattttcttcttttcttcaatttttctagcctttttgcttgttacacctccagtttttatatctgcagccaaaattcaacaaaacatcaattctttaatatttaagcgcaaataactgctaaataattatttttaaagacaattttgccttattttctatcatcaaaatacaattatttagcagttatcaaaatcccccaaattaaaactttgcttgtccccaagcaaatcaaattaaaagcaggctccgaatgcttcaacactttcaatggctacaatttctcagattcctccaactggtcctttccgcatttgtcataatctcacaatggaagcatgaattacatcaagatgcaattggttagtatcggaaatcaatcaagttggtttgcctcactttcctcacaaggttagtgtttatctctacgcacaagtgtctggggtgagtgtttaaaatttatacgacctgcaattaagattcccaaattttgcacttcatctcaattaaagttattcttacttacatttggtggatcactaaggactgttattgccttgtaatggggcctggctagacaagaaatcatggtttttctgggatttcaaacttaaggttataagagagcattcatcctagaaaaacttatacttagcctaggctttatttgtttttcagccttaacacatatgcaatctatttttcttatttccaaccttagcacttatggcacctctttttttttttctgcccttattttctctcttttttttggaaagagactttgtgtttacaagctctttttattattattattattttttttttggaaagagactttgggcttacaagctcttttttttttttttttgggtgccttattatgtgctacttttacattcccaagaccatcttcattctacccatcccccaaattaggagtttattatgactaaaacctttatgctctcttagaaccctaaaataaggttagagatatcacaattaggctcaggggttttatttaaaaataataattactaattttggctcaacaagggtgcaagggatacatttcatcacaggttggctttttggctatgtggctaaaataaaaaaaacatggccttgatcatatccaccttatgtaaataatctaatagtctaagaatgatgcaaaattaggaatttaaaaacagacgttctctcataattaagttcacacagctctccgggacaagataaagttatcggcttaccggaacatgatctctttccatcaagctaaccttttctctctttgtgattcatgtctcactgtttgactgactcttgcttccaggaaaccagtattttcacaattgtcatgtagcatttcaagtgttgaatccttcagaaaatgcctaaatagtgacttcacaaatatcatgcaatttttattcaatgactaagtttaaactactgaaattaaaatgcataaaatcaaaatgcacaaattcaaaataaagaaaataaataacacaactatcctaaaaaaaaacaaattgcaattaactaaaagagaaataaagtaagaagtcctgggttgcctcccagtaagcgcttctttaacgtcattagcttgacgggtcaaatgccttcaaggtggcatgaaggtcacaaagaacacatcttccttgcatttccgtctcttagctagagacgccatgaaactcatgtatgctggaaacaccttccatattgtagcaagaaaagtgctggtggtcaaggagagaaggacacttaagggtttatcatgttttccatgtctttcttccttgacaatcagttgatgaggagtggtattgacttggagaatactttcttgttgaatttctacttgtgagtacttctccgattgttgtgctttctcctcatttctttctatctcttccttcttttcttcttccacatcttcctcagttaaaattaccttgcactcctttttgggcttcatctcagtatttaccgtaaaggtttcggtgggcctttcagcaactaacttagctaattgtacttccagatttctgattgctgcatcagtgctcttctgatgtgaccttgtttcctgcatgaattgtaccagcaattcttctagcctactgctttcttcctgtgggctgggctcttggtcgcgtagaatgacataatcataggccgccatattctctattagctcaatagcttcttctggagtctttaacttgatctttccaccggctgaggcgtcaaggagctgcttggaatggggttgcaagccatcaataaagatgttgagctgaactggctcactaaacccatgtgtaggagtcttccaaagtaacccatgaaagcgatcaagggcttcactcaatgattcatgagggtgttggtggaaggatgagatttccacctttccctcaatggtcttggactctgggaaatatttcttcaagaacttctccaccacctcgttccatgtctgcaggctattccccttaaacgagcgaagccatgttcttgcttcaccggccaaggaaaaacaaaataagtcaaggtggatggcatcttcaggcactcctactatcttcaccgtgttgcaaatgtcgacgtatgtggccaagtgtgcgtatggatcttcagttggtaggccgtaaaatatattcccttgaatcagctggatcaaggaatatggatatgagaagttggccgtctgcacctctggtctagctatgctggtgaagtactgaggtataatagggctagagtagtcctctagcgtcattctctgtggatgattttctgtcatgatgcgttcttcgaagaaggagtgtgcactgttaacaaaagaaataactaccgtgcacgttatcacagaataaataattttttttattttaattttttttattatttttttttataaaaaaaagaagaataaagtaagaatgagtaaagagaaaaaaattgaataataaaataaagcagctaaaataaataatagataaaaaaacaaaaaacaaaataaaaataaaaatagagagtgaaaactaattgcttacaaattgaaatatgcaattaatcaagtacgaaaaacaaagtccccggcaacggcgccaaaaacttgttaactcgttggcaagtgtaccaaatcgtcacaagtagtaaagttctcggaagtccgagtgtcgaatccacagggactttgtttgtacttagattaatgcaaacccaatttaaaagcaagagataagaaatttaaaatttaaaataaaagataaagataatagataagataagatgaaagaaatttaaaataaaagataaagataatagataagataagataaaagatttttaaaatttaaaataaaagaaaaagataaagtcaagataagatattgggaactgacttgcctaacctgcctaggatgtatgagtttatgatttttctttaccaattcaggtgattctatcccacccacatctattcatttacttgtccctgatgcctcacgatgacaagcctattttacctatctatcccccaaatgcctttgcaaagacgcaatagataaaatgcatgaagttctaattctagatgtttgctttgacgcatgggcataatgcaatcactctatgcctagcaatgattttattatgatatcttttcttcttgttctattagaagttatcctctcccgagcgtctaaccccctaaaactaatgcatgcatatcttctttaaatcttatttagaagttaccctctcccgagcatctaacccctaacagaatataaagatgagtatgcaaggtaaaaacagaaaagaaaataggaaagaaaaacctggtattgcattgataaatagtgaagagtacatcatacatcgcattggcttctaggcctgccagaccctaactaagggtttagccactcatggccattgaggactttacaatgagaaggggtgaaagaaagggagtaagtgaaacccctaggagagggggttctgtcgtggtgtgttctgtcccttggactggctctctatttatagctgctgaagtgggctttgggccttcgtaggcacgctcagcgtgacaccccctcgctcagcgcgtgtagatcgcgcgcttagcgtgcatgttgcaggcttagcgcacgcttctgttagatcgcgggcttagcgcgcgtgttgcactgggcctgcttcagattttcttcttttcttcaatttttctagcctttttgcttgttacacctccagtttttatatctgcagccaaaattcaacaaaacatcaattctttaatatttaagcgcaaataactgctaaataattatttttaaagacaattttgccttattttctatcatcaaaatacaattatttagcagttatcaatctctcagtgttctggtacgttcaatttctaattaagccttcctttttcttaaagaacactacactacagtgttatgtttccatttcctatgcaatgaatgatctatcagtcttgttagttgtcatataacaacttatgtttttacattcagttgaaggaagttcccagaatggtagaaagcaggggacagatgaaacggccacagctaagaatagtgaatctcatatcgggaaaagattgttagaaagtttggttgcagatgaaacggtcacaattctcattcttgaaccagtgtgaaaacggacaaattcagtttcatgttatatatggctctgtatatgaaaaggaaattaaagaaaaagtagaatttgattatggctaatttcacccattatatttattacaagaaaacctttagataaaaattatttttttgtacttttagcttggtcgtaaacattaacattacatcacgcacaaacataaaaggcaaaccaaattattttacatccctaaattttatgaggaaggatgctataaatattaacaatacatctcacacacacaaagacaactaaaattatatcactaaattgatgtggggatagttttgaaaaaaaaatagtaggtgtggttgtgtaggtgtgtttttatgtttttcaattcaggatattaaatttacaaataattttatgtttttcaattagattttaacaataattaagaaataaatctaaatcattctacatttgtttataggtacttggcgaattggagatgctatatgggaatctaaattttgcttaacacaaatgtggtatatgcaaggaaaaatcaaattgaaaaatttttaaccaccacttcaaattttaaaagatttgtttcaaaataaggatatgaagaacaaattgtttttacagaacattccctccatgatgttttcctttcctttaggtgaaaaaaatagacatttccaaaaataatggaagtgaaccttatataatgctgtttatatagagaagtctttcaaaatacaatttaaagtactattactacaaactattttgtattatatatctcttatatattttgatataaaacatttattaattttttatttatttcttagtaacatgtacatgaaagtcaaaccaaaccgaatcgaggatttatgtggcatttaacttttatcactttctgccctcaaagatcacactctaatcatgtaccaacattttgtggtatacaagaaaactcttctatttgagaacagacgatttttatttgaacctcttttggcaaatggaactagctttggattcccatgtgacaaaaaactactttcctaactttggattaaccaaatctgaaaagcgtttcgtgtaatattggctacgcatgactagttaacttctgaaacggtcagctacttcataaccttttgatgtcattctccccaacaaaaaacaattgcaacttgttacctagcaacagcttgaattgcttgctttctcacgcacttagtgaccctagatgcttgtgaaataaattgttataaccttcactgtttttcatcaatattaccaaaatttccttaaagtgttcaatatttcgtaatcttcataattaattcaaaattctcaaaagattagtatatgaccttttttcttgtttgtactaggagaggaataaatgaaaaaaattcagaaatttgtggattgcaatttgctcaaatgatgtgtctattagttctttgaaatttgtattggtcatatttatttttaccttttaatagatatattgtgctgtcatcccaagagaaggatcaaacattgatgatgcagaggtgctaagatattgcaagaagaatcttgcatctttcaaagtccctgaaaaggtcttcattactgattctttgcccaagactgccaccggaaagattttgcgtcgtcttgtggcagaacacattgtctctcaaatttgagcaactgatcaagtcctacttttgaagcctccatacctggccatacatagttggagtccacacaccataaatttcaacaataatttggcaacttggcatttaagaggagggtaattctgcaaatggtctttcattcaggatacaatagattgtagttttcaatgattcacgtgaaatgttcacaatgtaatgttttcaatgttttataggtcttaaataccaatagcagacaagatcaagcttatgcttttttgctatcgtgctactgttccttgccactggtcttgatgaagccaagcattgtctctttgccttttaagttgtacatagttgcaaaacgggtacatgtgaaagaataatgcttattaaaggtaaggttgattttaaagtgggcatgcaagaacgcattcatcatctcaagtaaataaaattcaagcgaatatgtgatttggattagagaatagtattatccagtgcacactaaattggagagattcccaacatgtggtttcaaaactaaaagtacttaccaactatttgaattttaatctacgtgatctagctaatgttttctatcagagaattacaactagttgatcttaagtacaaaactatactaaatatgcaaatctttacatctaaaaacagaatttaaataaggctctcaaatttgaagaaaaaaaagaagatagcaatgactacaaattgatcaatctgccaatacaatgataaaacatcggtttattctaagcaacactaaaaagtgatactacatgagcaaaaagattgaaattattgaccatgcagtatgaatgtacagcattatttatttaatttttctaatacaattttattttatattaatacactatatcattatgacatcaacccccaacatgagtggcccagtggacaagcccatcaatctaacatgtcggttgatagaacttgcataaacttttgttccttgcatcatctcatgtgtctccattctccattctctgcttccactaacgatatattaaaccttattgattagggttcaatgatttttcaatgaataaaattaattttaaattcttgattctaacagctcacgtattgtctgttgaatcaaatggattaaactcttgatatcataaagaaaattaaaaattgattctttgtgtaaaataaagaaatctaattaattatgcttgttatgttactatatcatttttcgggtgtggagtaacatcaaaatcaaagtaacaaagttacttgcatgttactctaactgttatgaatcaaccatcagacaaatcaaatcatgaggaggcaagcattaacagaataggagcaggattgctgagttggcattgcgggattgggcccttggatgatcctgtcgggaatatgctttttctgttaggataattgttgcaattatgttattgctagctttctctagaacctgcaaaaaaggaacgaacaattagtaaatgaagcttataaattgccaacccatgtaatgaatttgcaagcagaaatcaaagtttcctttccttatcttatccctttctttggaggaattctgggccccgaactccagaaacaccagcactcataacactaacgataattccagctaagtcgaatatggtttcatgttttgtaaaacaatttagatcccctttatcaaagtgtatctgtcttttacacaagttttttcactttattttatttccctcagaatcaattgttgtgttattcgtactattaaattaatccgataactaccatgtcgatcattgttagttttatttccaccattgttcggagtaagtatatactattactttatgattaaacgtgttatttaaattgcaaataaaaactctttataatgaagtacaattgtttataactacaacaattatattgagtcaatttaacactcatcaaaggcagaaaagctttactttaagattagacagaggctcataccaatcatggcggtggttataattacacacatcagcaactgtaaaagatcttgcacagccacagaaaaaaaaaatgcttgatgcacatctgataaactcactcaaggtctatgtattaatagtgtaaaagagagactgaatattaaatgataaaaatataaaataattgttttgtattggcagagtacacatatatatgcccaaatgtagattcaaagttcaaacattttgggcctagatcagaccatccctcctagtcatagccatctgaattggatcgaccccaccccaaggtttgtgttgcatcacttgcatgcattcacccaccacagttgttatagttttctcgtgatttttgtattggaaaatactatggacaaatataattgatacagtcatgttgcaattacaaagactcctcaaagaatatgtttagtaaatcatgatcaagtagaaattgcaatggcaaactgttttttaaaatcttattagtcagttgtataaacccaaatttagatatattcaggtatgtaatatttgccattttagtgctctgtttggaaatttgcgtgtcgaaatgttttttttatacgtacctacacaacactctttagccaaataccactgttcatggaggaatctgtcctgaaaggagtatagaaccagaaacaatatgcgtggtggtatctatcattctgaagaagagaaaaagtgggatacgtacaatagtaggactgtgacactactagaaaaatgtatgcacctttcatgtccctaaatttatgaacaaaagattcaggtatcgtttattgaatttgttttatatggagtgtaaagtcatcatatccaatactaataagtgtatgtttatataattctttttaaaataattactcttccttatttacatctaataaaaatgttatcacattaatttttaaattaagctaaatgaagcatgtttcataagaaattaacttttactgtaattgttacattttttagtgacaaagggagatgggtgaagacggtgaaggaaaaaaaaatgaagataatgtctatgttgttcaaataacagtattaattgtattaaaatagttaatattaaaaaataaattagtaaatataacaacaaattgttgtgttggtgctatttattgtgcatcaaaatatgtaaaaataataattaacttgtaatttgtatagttggtatgggttgttttatctatcctggattttgttgtatcacacatataatcatttatatatatatgggctactattgtcactaccaaaaatgctattgagactaccaaagcatttgaaattacttggttatccttagttccatttccccacacctcctatccttcccctctttacgttcagctactctccctctttacatccaaaaacagaatttaaataaggctctcaaatttgaaaaaaaaaaaaaaaaaagaagatagcaatgactacaaattgatcaacctgccaataataaaacttcggagtattctaagcaacactaaacagtcatactacctgagcgaaaagattgaagtttgaaccacacatgatcaaggaaatgaaaataggcataccgccatgatctacaaatcagcaaaggagcaatcactatccagaatcccacaataaatccaattgtcatactcacaaaaaaccaattcactccatgcccatcacttccttcataactatgggttttcccattggagctgcagtttatgggcagtggtggaccacatagattgttgccgatgaagctggaggcatcaaaggtttgcaattgagttcctgttggaatatttcccttcaaatgattataagacaagtctagcatgctcagaaagctcaaatttgccatgcttggagggatttcaccagaaagttgattccttgaaaaatcaatggactgtaataatctcatattacctataccttgtggaatatgaccaatcaattggttgtgggacaagtttaaaaaattcaatccatttagatatgtgatttctcttggtatttcccctaataacttgttacttgacagatcaatgcttgttaccaaacccagaaagtttctgtactcatctcctcttcctttcagccatagtagagcactaactatactttgcatcgaagagtaaggcatactagattgtgcttgagaatagatacgaggatctgtactttggttcattagtgtcatggcactcaagttactgaaacagctccgtatattgccagacagattgttttgtgcaaggtctaaaacctgaagatgactcatctgacatatttcacttggaatgtggccggcaaaactgtttgatcgaaggcggaggattttcacatttaagaggttttctccaacccatgttggaatagttcctgaaagattattttccccaaggtccaaggatatcaattggttattcttcttcaaactggttggaaatattcctgagagtgtgttgttacgaatttgtaaagactgcaggtctgccaaggaacccatggattggggtaagttcccaacaaaatggttgctttgtaaatttacatccacaagagatgtccaattcatccagcaatcaggtatctctcctgacaaattatttgatgcaagattcagaaattctaatagcattggcttgtcctgatcgttacataaaaagtcattcatggattcagagaatgaattgcttgaaagatctaactgaaacacatcacttgaaagatagggtaatttaccacacaagtgatttgagcttagatcaatagttgggatagatattggattctttaatgtagtcccaatctcaccatggatatgattacgagagaggtttaaatacaaaacctgagaaagtgcttcccacatctgtgtgggaatagaatcgaaaatccccgtgttagatagtccaacatattgaagttggttttgtgactgaatccacaatggaaagctgggaccacctaactgccatgatgtcacatccaaataggtaagttgaaaattaggaatccaattgggacccacttttaaagtgaaattgttccccgatgcggcaaactccgtcaagcttgtaagatttgcaagatcatcttccttgacaactccgtgaaaaagattgccgtcaatatgaagagataacaatttagagagtgatcgaagactttcaaatggatttccactgaatttattcatagagagatcgagatatcttaatgatgaaagttttccaaatgatctaggaagagcaccaccaattgagttgttgaaaaaatctagcagctcaatatttttaaatgccccaatatgatctgtcagattgcctgaaagtcgtgaactctgaactgcaagtcttgtgagtccatgggaaatacaaggagcaagaatttctaaaagttcattaacctgttggttgagtttgagatatgataaatctatcacccttaagttgcagagattacccaaagaagttggaatgtttccttcaagttgactatatgacaaatcaatttcaacaagagaagtcaaattacccaaagaagttggaatgtttccttcaagttgattacctgataaatcaagttcaacaagagaagtcaaatttcccaaggcatcaggtatagaagatgagaatgaattggaagacaagtcaagattttgaagatgtgtgaggtttcgaataccacaaggaatcggaccttggatttcattaccccttaattgaagagaaacaagtttcttcaatttgaatatccacttggggacaaaagaaatggcaggggaataactggtattgtaaagatagagagtttgcagagatgagaagttgagcaaggatggttcattatagtgagggagtgtgcagagtgacaaatataggtgggtcaaagaaggaagagattggagagtgtgtagccaatgaaatgctttggataggtttgcatttctcaaatgaagatattcaagcttccacatacttgatacccattctacattttcagcaaacagaggttcggaaaaataatttccgaggtcaagatagagcaaattggagagattcccaatctgaggaggaatcttcccatagaattcagtaagagagaggtcgagatgagtcaaggaggtcattgcacaaaggaaagaaggaattgccataccttcaaaatcattgtagctcaagtcaagatatcgaagcttagagagattcccgatctgagagggtactgttccgttggcaacatatctcaggtcaagatacaccaaatttgagagattcccaatctgaggaggaatcttcccacggaatccagtaaaagagaggtcgaggtgagtcaaggaagtcattgtcccaaggaaagaaggaattgccataccttctccaaggaatctattgaagctcaagtcaagatatcgaagcttagagagattcccgatctgagagggtactgttccgttggcaacttctgaactcaggtcaagatacaccaaattttcagcaaacagaggaggtttgagatcagtagaataacctccgaggtcaaggtagaccaaatttgagagattcccaatctgagatggaatcttccccatcaatccagtaagagagaggtcgaggtgagtcaaggaggtcattgtcccaaggaaagaaggaattgacataccttctctaaggaatacattgccgctcaagtccaagtaattcaaatgctttaaatcagccaaacaaggacttatctctccaccaaagctccatctccgataagcttcctcatcgaagtgatagtagccatcatagtcataatagaaagcatcagaaagtgaagagttgaggtgaagctgaagaagatgggaagtgacgttgtggcagaggactccataccagtggcaacagttggtatgattatgattccaagaccaaagcctattggaaggatctatgagattattcttaaacttcaaaagtgtctcacgctcacttgggatgcacacactctctctgcatggtaagctcaacaaccaaagctggacaaagacaagaatataaatggaggaggaattcatgatcatgcaacgcaaatatagaaaacgagtgttttttttttagagctgatcgaaaaaagtgttttttttttagagctgatcaaattttaacttttatttaatcaatcctttcgttaaacttttgttgcgtacaaaagtccaatatttttttaagaaaaaaatcaagtcttctatttcatcaaatcccaacccatgattaatattaaattatcaaattttcaatattcaaactaaaaataatgtaaaagaaaattgtcttctaaatcatagctcacaccattaagttaatctcaaggttttccatttttttcatcttgaacctttggacactccacaaagtccagtcatgatgttaaggtctgacttcttcaacttgaaccatagatcactgcattactttcatatcaaacaaatgttgcgagttaagtaaagcaaggaaaaaaaatataattgatgaataaatcaattataggaaaagagtttactttaaagataattttggttaaaaaaatctataaaaaaaattattttgttctaagctagctatttaattttgatcaatttttcaattcacaaaataatattcttcttatatgtgaaaagactaattaatcttcattgtcattaatgattgttgtgttgtctatttctaattgtttttttaatcataatattattttcttttttattaaaaatttattagtgagatacaaagaagtttaaattgcttgtttagcttggtctatcataattattgagatcatagtttttccttttataagtcttgttccaaatttctccatgtattgtagatcatatttaacttaaaaagtaaattagaagatctacaaagaagtgtggcatgttttttaaattataaaattatggtcctagctatttattgttagaccacaagtcttcatatattaaagtttttgtctaaatttcatttatggtgatagtttaagaatactgatagaagagaaaaataaatatacaacttattgaaatatctaactcaattaattgaggaatacatcaattataggaaaagggtgtgctttaaagactatttctattaaaaaatctataaaaaaaattatttcgttccaatctaattatttaattttaatcaatttttcagttcacaaaataatattctcttatataggaaaaaaagactaaatttaattatcatcaattggaaaagttattgtgtcatgtatttctaattgtattcgaacttgaatattattttatttatcatataaaaattaattatttatataaaagacataaaaagaatattaactttttttctcaaaaaaaatcagtatcatattttatgttttttacaagttatcaacttaaataagaggagaaatataattttaattttaattttactttttaaataattgcaagtgccaaatttaaataatcatgagaatactcatgtttaatataatattctaaaaaaaatccatacgataacttaaacaatctacaaagaaatataatttattcttgtgccaaatgctaaaacaagaaacattttttattttagtttaccgtatagaattgcttaaatcaatgaaatttttattttaagaaaatattaatgatttttatatcaaaggtaattaaatttggcttaattagtcttcaaattttaactattattcaaatcaatcctttcgttaaacctgtacatgttaagtaaacaacaaaaagtcttgccttataaaattcaaacatttttattacatgttgtttgaacccataattaattttaaactatcaaattttaattattcaaaataaaagaaatgaaaacaaaattgtctcctagacaaaccgctggccactccaccaaatccatatcaaggtccccacttttccaacttgaaccatagactactccatcaagtccatgtgaaggtcctccattttttcattttgaaccttaggacactccacaaagtccacccatatagaaaacatcttaattgtataagtgcttcttgcttctgcatataaatcataaaacttctattatttatactgctgcaagtgtctttctttttttttttttttatgatgtttcctttttttaattattgactttattatccaattctccagagttaattcttagaataggaaataattttgaatttactttatctatctccctttttaaaattcctatatacacaattttgtattgaaattaactattatttaatcaatcctttcgttatacttttgttaattaaacaataaaaatccaacattttattaaaaaaattcaagtcttctatttcatggactctataaagtcttttattaaaagtccaacttttgttaattcaagtcttttacaaaattttgttaattcaacttttgttaattattacaaaatttggtattgaatttaactattacttaattcaagtcttttattaaaagtccaacttttgttaatttaactattattttgttaattaaaccatagccgattccatcaagtccatgtcaaggtcctctattttttcatcttgaacctttggacactgcacaaaatccagccatgttatgatctctggcttcaacttgaaccatagcctgggccacaaacaatatattaatgataaatacatcaattataggaaaagggtctaatttaaagactatttcagttaaaaaaaattatataaaaagagattatttcgttcatatcttgctatttaattttgatcaattttttaattcacaaaataatattctctttatatatgaaaaaagactagatttaatcatcattaattggaatggttgttgtgtgatctatttctaattgtattcgaacatgaatattattttctttatcatataaaaattaattagtgatataaaaagaagtgtgaaaaagaatattaacttttttttctaaaaaaaattagtagcatattttgtatttttttacatgtcatcaacttaaataataggagaaacataattttaatttccattttaattgccaaatttaagcaattataaaattactcatgttcaatataatattctaaaaaaaatatacatacgataacttaaataatctactaagaaatatgatttattcttgtgcagatcgaatactaaaataagaaaaaaaaatattttagatcacaatatagaattgcttaaatcaatgaaatattattttaagaaaatattaatcattttttaatactttaaatcaaaagtaattaaatttagtttaattagtcttcaaattttaactattatttaaatcaatcctttggttacacctttgttaagtaaatgatagcatagcaagcaaggaggtgcaagcagtaacactcacaaaaataaagatctttaagccatcatttttttttccttttcttttctatgaactgtcatttcttatctctacatggaatgcctagaagttgaaaactggagctttctttaactatactgctttccattttggcgaactgcttttctttctcataatgaactttccacttccaatgatggttcaacattaatcattctttatctattttgtctaaaaatttccactcactttttgtgagtggtgtgaatgtcatgcagacaaatgatgtccaagctccactttttccattcattgcaagttgtaagcagaatgtagaatgtacatataataaaataatgagaatggcaactactagtacgtagtacttaattagaacaaaagtatcaaaattaaaacgaaaataactttgatgctgttaatacatgagtttaattttgatacacagtgtaaaaatttaaattgttaattaattagaaatcacctaatgatttgtaaaacaattactaaaaaaagttataggagaatatatataattaattgcaattctaagtgtatttaaattaaattcttaattagcatatccttattgtgatattttgtatatattttatttattgagacagtggaatgagaccgcactataattttcatcacgggtgtggttgtcaaatataatagggatggttgggatgatgttgcaggtgccggtttgttgttaaggccttgagggaaaatgtattttttgaagaaaataaaattataaaaaattgttttaaattaacattagctaaataatgacgtacccgtaaaatatttaataacacaaaattgatttatagtaagtcaaaaaccgtcaatattcatttgaaacttagtcttccaccgtctcaagctcttcacatgaacactaagctctagataaaaataaataaataaccacgagaaataatatataactctttagtggacaattggtgttcttttgtgcattcagttgaaggaagttcccagaatcatagaaagcaagggacagatgaaacggccacagctaagaatagagaatcttatatcgggaagagattgttagaaagtttggttgcagttgcagggcttctaatttggctttcatgagcttaactcaaatactacctatatattaccattttcatatcacgttgaaatgtaaaccattgattagttgatagtgtaaaaaatatttacactcttgagtgtactaaatctctgacatactgacaattatgttcattctcattggagatttattttatatttttaatactaacctatagtatacagatcaaagttggtgaaaattatgttcattctcattcttggcgctgttagtctagtttgaacacggacaacttcagtttcctgttatatatggcactgtatataaaaaggaaataaaaaaaaagtagaatttgattatggctaatttcacccattatatttattacaagaaaacctttagaaaacatttaaactttcattttaatatagaatttttctaaattgttatggtgcatgattaaactttaatcatggagtacacgtttttgccttatataagtaacatggtttaacgtgatttgtttattatttatcttttcctctagttgtgttcattgttgtttgaaaattttctttaatattttgttgtttggacaatcacttacttacaccttatgaaattcacgaattggtttggaggcctgactatcaaatttcatctcgcatcagattaaacatcgcgttactataccatatagttatatgtgatttttttcccatgcaatgttatattatgtgatttttttcccattcaatgttatatttagctacacattaaaattaattttatacaaaaaaatttgcatataggttgtttttagtgaatcaaattcttttttaattcaaatagggacattagttttcgtatccgttaagaataattgctacctaatttaaataattgtattaaattctaatcataaaaaaaattccgtatttattatcgtaaaaatatttgacaatttaatcattaatttcgtattataattgatacttgacaactaatatttattgcacttaatttcatttgataataactgatatttcttcaatcgcgtatcatttgtggcaaaacgaacatccaatatcattggagaacaatgttgatgtaacgattaattcattgagaatcacatgaatgcattaaattcaggatattaaatttacaaataattttatgtttttcaattatattttaacaataattaagaaataaatctaaatcgttctacatttacatttgtttataggtatttgggatattggagatgctatatccgaatctaaattttgcttaacacaaatgtggtatgcaaggaaaaatgacattgaaatatttttatctgccacttcaaattttaaaagatttgtttcaaaataaggatattgatacgggtacagggtatgaagaagaagatgctgaggaagaagaagatcagagttcagctcaagagaagaaaaagggggtgcaaggagaagaaaagcccaaaaaaagaattgttaagcccagctacttaaaggactacgtttaaagaatacagctacatagcagcctcatacattcagcctcatgcttaataggaaaatttttaagagatatataaccaattctgttacttccatattctagaatgattcctacttatccagctcagcacaattctgttatgaaaccacttatataataccatgtaataatgattatgaggcaatgagaatattcaagttttcccttaccttcttactttcttctttgaggaggattctggacctcgaattccagagccaacagatatgaagaacaaattattgattttagagaacatttcctccatgatgttttcctttcctttaggtgaaaaacaaatagagatttccaaaaataatgaaaatgcatcttatataatgttgtttatatatagagaagtctttgaaaatataagtcaagtactattactacaaactattctgtatcatatatctcttatatattttgatataaaacatttattaattttttatttatttcttagtaacatgtacatgaaagtcaaaccaaaccgaatcgaggatttatgtggcatttaacttttatcactttttgccctaaaagatcacactttaatcatgtaccaaaattttgtgccgtacaagaaaactcttctatttgggaacagtcgatctttaattgaacctcttttggcaaatggaactagctttggattaccatgtgacaaaaaattactttgctaaccattattttattttaatttaccctatagaattgattaaatgaaaatttggtgtcattaaacttcaaattttaaccattatttaatcaatcctttcgttaaacttttgttacgtacaaaagtctaacatttaaaaaaaatcaagtcttctatttcatcatatcccaacccataattaatattaaattatcaatttttcaatattccaactaaaaataatgcaaaagaaaattgtcttctaaaccatagctcacaccatcaagtccatctcaaggttttccattttttcatcttgaacctttggacactccacaaagtccagccatgtcatggtctgacttcttcaacttgaaccataggtaccataggtcactgcattaccttcatatcaaattctctgtcattgacaacaaatgttgcgagttaagtcaagcaaggaaaaaaaatataattgatgaatacatcaataattataggaaaagggtgtactttaaagactatttcggttaaaaaatcaatataaaaaaagagtatttagttccaatccaacaatttaattttgatcaatttttcaattcgcaaaataatattctcttatatatgaaaaaaaaagactaaatttaattgtcatcaattgaaaaggttgtctgtgtcatctatttctaattgtattcaaacctaaatatgattttctttatcatataaaaattaattattgatataaaaagaagtggtgaaaaagaatttaacttttttctataaaaaaaatagtatcatattttgtatttttttttataagttgtcaacttaaataataggagaagcataatttttattttcattttacttttaaaataattgtaagtgccaaatttgaacagtgataaaaataatcacgttcaatataatattctaaaaaaaatatttatacgataacttaaacaatcttctacaaagaagtatattttattcttgtcccaaatactaaaataagaaacattttattttaatttataggatttcttaaatcaatgaaatttttattttaagaaaatattaataatttttttaaaactttgagtagtttacagcaaaggtaattaaattcggcttaattagtcttaaaattttaactattatttaaatcaattattcctttcgttaaacctgtacgtgttaagtaaataacaaaatgtctcgccttataaaatttaaatattctattacttgcagtttgaacctataattaattttaaaatatcaaatttttattattccaaataaaagaaatgaaaataaaattgtctagtctcctagacaaaccacttcccactccaccaaattcatatcaaggaccccacttttcccacttgaaccatagactactccatcaagtccaagtcaatgtcgttcattttttcatcttgaaccttaggacactccacaaagtccagccaaccatattcaggtctctatcttcttcaacatgaaccataggtcactacattaccttcatatcaagttccttatcattgacaacaaatgtttagaattaagtaagcaaggaaaaaaattataaatgatgaatacatcaattataggaaaatgatctaatttaaagactatttcggttaaaaaatctatataaaaaaagactctttcgttttaatctagctatttaattttgatctattttttaatttacaaaataatattcttcttatatgtgaaaaaagactaattttcattgtcattaatcggaaagattgttgtgtcgtctatttctaattgtattttagcctaaatattattttctttttcattaaaaattaattagtaagatacaaagaagtgtaaaatgcttgtttaaattggtctatcataattattgagatcataacttttccttttataagtcttggtccaaatttctccatatattgtagatcatatttaacttaaaaagtaaattagaggatatgatataccaagaagtgtggcatgttttttaaattatttatctatggtcttagctattttgttgttagaccacaagtcttcatatattaaagtctttgtctgaatttcatttacttgtgtggtgatattttaagaatagtgataaaagagaaaaataaatatataatttattgaaatatctaacttatgaagatttgcattcttaatgcataagcttttcagtttatatattatcattatttggaaatattttttgtgttaattgtctatttctaattaatttgaaaatgaatcttaattttttatcataaaaattagtatcatatttttttttattttctttacaagttatcaacttaaatactaataggagcaacataattttaatttccattttactttttaaataattttaagtgccaaatttaagcaatcataaaaatactcacgttcaatataatatttttttaaaataattcaggagataacttaaataatctataaagaaatataatttattcttgtgccaaatattaaaataagaaacattttatttttttattttaacgtatagaattgcttaaattaatgcaaattttattataaataaatattaatattttaaaaaaattattagtttacaataaaggtaattaaatttggcttaataattagtcttcaaattttaaccatttaaatcaattctttggttacacctgtgttaaataaacaacaaaaaaagtcttgcattattaaattcaagtcttctattacatgcaatttgaacctataactaattttaaatgatcaaatttttattattcaaaataaaagaaaagaaaaaaaaattgtcttctagacaaaccgcagacaactccaccaaatccatatcaaggtccccactttttcaacttgaaccataggtcactccatcaaatctatgccaaagattcttatcattgacaacaaatgttgagagttaagtcaagcatgaaaaaaatagggtaaaatatatcatttctatccctataaaattttaatgtgctacttttttttttatcctgagttaagtttggatgatagataattatcatgtattcttagattttggtgtcattttaggatatttatgtgatatatggcttttatgcttttttattgtcatgaactaatcttctcttttgttggagttgaatataattggttcatctttcatgtaatgactattttttatttattgaataaagcattctaattgtttctcttctatgtgtaatatgtatttttggcttaatctatgatttttttattcaattgtaattaaaaaatttctttgaactacgaattgcaaaaaacacctaaatttttttatgtctaggaataagataaaaagaattgagcatcaataaacactttatcataatgaaaatcatttagttatattaatttaagggattgatagtgtaatcaagggatttaggtctcttcactaggaattaaagtgaaaataatatgatgggtttatgataatataacctttattaaatatgaatgtgtagttattaggtgatagaaacttcaatgaaactaaaccccaacaattttttcattgatttaaccccaacaattacatggggtgtttgttaagtcattgttagtgcacagatagtagaagacaataatgcgtgataaatacaaaacagaatttgatgctcaagtctgaagctcgtctagttctcttaacattaagaacatttattaccaatgaaagcaaaacaaacagacaccccatatgaacatgtacatagtatggtaaaccttttcacatttttaatgtctagaataacacgttgtaatgtctctcactcctaacagttaacatgtaaactcacaatttcccaagtaaccttcttaccttcaaaactattatcacataaatcagatctctcaagtggtcaagataatgaaaataagcacgcctccaagttctgttgaagaaaacaacactgcaaaaaccccaaaatcctgctgcaaatccaactcccataccgatataaaactctgatgttccaaagaaattaccatcaccgtgtccaacagaagcactctctgtcaactcttccttgtctgtgcaattttttgttacaggaggaccacaaagctcaggatttccagtgtagctaagttcttcaaagctctgaagttgggtgctcgtgggaattctgcctgataagttgttgtatgatagattcaggacactgaggaaggacaaatcagataagctttgagggatttgacctgaaatgttgtttcgtgagagatcaagggattctaacaatttcatttttcccatgtcatttggtatccctccaaacagatgatttctagacaagttcaaaaaccgcaaagcagatagcttggaaatttcagatggaattgctccagacagcttattacttgaaagatcaatcattctcaccaatatcagattgtctctgtactctaactcatctcctttgggaactaagacaagagtttccttgtagtggttataactgaagtcagagccatatgaataacttaaagggttggcaaagaagtcatcttcaccagccattgtcttcatgtcatccaaacaatttggaatggatcctgacaggctgttattgccaagatccagcactataagggaagaaagttgacaaatcttttgagtaatgctgccattgaaattgttggatcttagacgaagaaccattagatattgcatttcccacatccaatctggtattgcgtcagaaagttggttattgcccatgtcaatgaatttcattgtagagcaattttgcagtgttgaaggaatatatccagagaagcggttgtcgtctaacaacaaagactcaagttgagatagataccccatggagtttggaataaaacttcgtacaccattgcccagaggctcttcgctatgcgaaggtatgggggagggatattgtacgcaaccttacccttgcatatgcaaagaggctgtttccggattcgaacccatgaccaacaaatcaccaaggcacaactttaccgctgcaccagggctcgccctctttggagtttggaataacaccagacaaattgttactacccaagttcaaatgcaccaatgcttgccaatgcacccaacagtgacaagatcaccagataagacattatttgaaaaatcaagcacacttaacttattagtagcattttcctttccacataaaaagggagaaattgttccggaaattgagttattggcaacattcagcacttcaacatttgcagacacacttggcaatgtacccttgaacaaattagaactcaaatttatgaggctggaattgagaaagatgttagataggtctccacttaacagattgttggacagatccaggaattcagtttgcaatgtccaattccaaaaccaacttggaaccaagtctgcaatacctgccttagacattgtcaaaaccttcacagaactttgcctttttagccattctggaaacttaggacctattccaaaggagctcagtaaaacatattcaagctgaaaaggagtaacccatccagagttgacactgaggaacaagtttgtccaagacaaacctagttcctttaatttcaaaagttttacaaaatttgactcctttatagatccttctaacaaattagatgaaaggtctaacatcactaaatttgagagagttccaagagttacgggcatatcaccagtcaaagaattagttccaagatttaatacctgcaggtttctgaggagctcaaaactcttaggaatggttccattcagtcggttgtgagccaggtttaaagttctcaaggatgacaagtttgcaaatggtgagggaattggacaagtaaaggtattattactgagatttagaacttcaagatgcttaagctggcctaatgaatctggaagtggcccactgagctggttgttctgcaggtctagattttttatgttctgaaggcttgatattatttgtggaatttgtccctgtaaaaggttactgtgtaaatcaagttggacaagagttgtgctgacattaaatagccatgaagggatttgctgattgagattgttaattgaaagatcaaggacttggagatgtgtgaagttggtttttccttttggtggtcctaagttatcaatttgacagctctccaagtgtagttctgaaagagatggaagtgcactcagtacttgaagccagttaccttgtttatgaaggtctgaaccactcaaatcaaggtactctaaggaagatagccttgatatccaattaaggttatctatctgaagagcataattgtatccaagattaaggtgctgcaggtttgagaggtttcctagttgatgagggattaatcccatgaacccacttaagctaaggtccaagtatctcagactctccaatgagcctaggaagcttggtattggagtaagaacaaaataatttgaactcaagtccaaacgattcaaatattttagttcaagcaaagaaggactaatctctccactcaactccctatagggagagcccgcaggtgtgtcaagattgatttccatgactttacctgtgttgttgcagtgaacccctggccatgtacagcaatccgatttgtcagaccatgatgaaagcctgtttgaagggtctgctagtccatgcttgaagctgaggagtgcattcctttccttctcactgcaagtcatattgagccttgctgccttgcttgcactgaagtggagagttgttgcagtggacaatatcaagagaagaacatgagttgcaaatagcactgccatgaagaagaaggaagacgaaaaaggttgaatacacaattttctggttcacggttggtatttactactaacaatgcctatataggatatatagttatataccatagaagggtttgcatttaaaattttattccactaatggtggtggttgcaaaatgcacacatatgtagaggtatatatgtctacaacgagacatttaggaataaaagtgtctaaccacaccaccattattttgcactagtttgttttattttgatttaactacctttttagttcttatagttgtgataatttttcttttagtccctatagtttaagacatttattttggttcctatatttacaattttttttaacttttggtcctcacggggaagattcaactcacacataaacatgaacaaaattaataaaaatagggaagcaagctgaggtacaactgaagtgtaatggagctatgagacaaaggcactacacattccattattcttgagtctgccaccgacctctgcaagcttagcatttgccaattgccatgatgtaatctccttcttgacagtctctcatcaagttggagtggtatcacagcattgaactaagttgaacgttccaatgggatgatggttttgattgctgcagataaagtgtgtgattgtgagtttctggttccatgagtaacagaggtgaggtagtttgtgccttcatggttgggatgatgcatgttgcaggtgccggccggtttgttgttgagagaaaagatgatcagccacgtctcgtgtgtgcataggagagtgtctttgccctctccacgacattagtttcaaaaattgacgttagtcgaaacttgatggtgagaatcaaaagagtaaaaaataaattcaactgggactaaagtagaatgatttaaactataaaaaatattgtgataactttaagggtcaaaaggactattaaactttctttttttttttgaaacgggttatatatatgtagcagtttattctaaacaatggactacgtgtgaaatctttgaattctatgtaagaaatgttatttcaaacttctcatcagtcttcatgtcaatgatgacatgctccatttgaattctatgtctaattaagctctcggtcttccgtttttgcaactttattttggtagaaagaaaccaaatttgaagatacaacatttgatactataactgtttggtgttttgaaaatctcactcacatatttccaaatgttacaaaagaatttgattcagtggtttttacgaatttcttcctagccttttttaacaagtcagggaatttgcattgttgtgcatgatggctgccaccaggacccttgtaccaacccattagtgcaagtggttttttcttatgagaattgagaaacaaattatgtgttttataaagggaattctattatttttaattttgaacttgtaatgttttttgtttccctcacagaacaagttaatttagggatataaaataatttggttgccttttatgcatggttatcaaactctcgagttaactcgctaactcttacgagtttacgagtccacttgtcctttgcgagttgactcttgagtaaacgtaaactctggataaactctaagtaaactcggtagactctcgagcttaccaccgagttaacgagttagcaattaaaaaaattagaccaaaatgtaagtcatttttttattgttttatgtgtgtttagcattcaacatatcttcattgagcatgttattctcaaatacaaaattctcatatttaataatatcaaactcctattctcaaataacatcaaacccttgatgagaatgatctaccactactataacatttacaagttattgtctactagtgatgtattattactagacatggttatttaaatattctgaactttatgatttattgttttgctttattatattgttgaaatgtttaattcgtatgatatttatagatattttgttattatttttatatgaagtagactcttacgaatctatgagttaagtttacgagtcgagtctatagaactctcacgagtctgcgaaaactctcgagtttgataaccttgcatcaaatgatttgtaaaacaattaaaacccacaatttgaaggacatctgatttacaaaaacttcttacaactcacaacctttggaatttctctatgcctggttaacccacaatttcggcgcctgttgcggttaggaacataggctagcaaaaacactaatcatttcaagagaaatgttaacacacttttctaatatattattttttatattaaaatttattaaaataaaaaattcagctgatctcattttatttagcaaatttttctcatatattaagtattaggtttttaaaattataaagctaaaactaaaatgctttactaaatgtattttaaagtaaattttatacacaaaaatattatgattttataaaaattgtttggtcaagggagacatattgagccctcctaactataagctaccctgagggtttctatcttttttttttcccacttaatttttgactttggcagcaagggttaaacctaccacatctacatgactatgtcttactttccaataagttacacctaaatagctaacatattcctcttgctcacgcacactatctttcgtaaacttttcacgatcatctttatattatcaaattcatttaattaaatatacaattatcttaatattataagcaagtctctgtataatcatgtagtgtttctaaattgaatgagcctaaatcacacagtcctgaaaaaaaaaagagtcatattgtcaaaatagccgtaaaaagatagaaatactaagttatgggcaagattttgatatactataaccttaatttttacaataaacctaaatgtctaaatatcataactcaaccatgcgacgaaatgacaatgtgttaattttgttttgtcctcaaccatgcgtatgcctcaggccgagggaattctcacacaatattttacatgtagcaccacaacctaacaatttctacctacaactttttctatagactataatataatctatctccactcattcattcatcaagattgagaaatggattcaaatgcttgtctaccacacttgctagtgttagcaataacattggtattggttagtcatgcaatgggagattcagctcaagacaaacagaaatgtgcagaatccctgacagctgttgcaacgtgtctgccatatttgggtgctgacgcgaaagcacccacagcagattgttgcagtggtctcacacaagccatgaagaccaacaagaagtgtgtctgccttattctcaaagacagggatgatcctgatcttggcttgaagactaacatgacaattgctgttggtcttcccaaagttaggggacagagatagtgcttttcccaaattctgttatcctcaaattctgttataacagagtttgttattatctgctagaaaacaataagcagtgtaagcctataaatatcaagagaaaaggaatgaaaaagcacagaacagaatttgaatttgcttatcttctctttatttccttcgttttgctcttagcagatagcctctgctatcagttcttcagactgtttggcggagaatgatgtgagacgcagaatgtgaaattgagagggaacttgaataagattaaaacagaagaagctgagaaaacattttcccgttgtttttgtttttttggattttagaacacttattttggaagggttctccaaacttatatattttggataagaaattgattacaaagtagtctaaaattattttataaaacagtttcttaactgagaatactcaggccgtaaatcttccaattttagtatatttctaaataaatcagaaatccaattgttacacaaatccaatggtggttctatcagtccttcgcccactaaatgcttgttacacaaatcttattgttcagtcctaaaattcttttatctctaataagaaataacgacttgttgtaatagaaattaaaatcttattttttttttaagtacacttgaggatgattttggtatcccacttttcaattgctcggttcgtttccatattttcaaattttacaaatttgattcattagttaacttaattgatatcaaattttacattttggtatccatatttacaaaattaacaaactatttttttttcctcgtaaagtctaaaactgataattcgtcaagcatgatatggtttctttagccaagtacaagataatctagattttacttgtatccttccaagatagtctaagaatgaatgagttaagttgaatatggaaaaacaaatattcattaagatgttatggtttgattatcccaataacttctctcccatgattcaacttgttgaattgagctttcctttctctctaatgttgcatacaaagttggagggtcaaaaggggcaggcatggtgcaagggtcggtatttgcaggaaccttgaccaatgattccatcataaatttctttactgatccttctgctccacaaaccattgactccacacatagttctgtagcattagcacttatggagggtttgtatctgaagagtttagcatatgaattcaggagatgaaacatgtagtcgtacacgtagagtggtagagtcacatgacagaatgtatttttgactgactgaccaagcagaaccttcaatgtacaccttatatctgcacgatcatgattgaattgaaacatttatttattgataaactgaacatatatgtccaataacaaaaatatattgttacatataattacaactgaagcatgaatggacagttttaatgttatacctataagtgcattgacttggcaagtctgatttgttgaacccctcttgtaattctcgaaaccaatcctgaaacaaaattttcatttgtcaagaaggaagctatatatgcggatttattgtgagtcaattaatagacaatatatattgtccagaaggaaaaaatcagtaatgttcaataacaggttatttcctttgattttgaatgtacttttaagttgtgtattaataaaagattaaaagttaaaaaagtgtataatgttatatacaatattgctgctggccattgtgttgcttgaatttgcctgttatttctagtttctgcacaccatgtgcttaagccaattttatataatgaaacttttgcttataagaaatattacatacaaaattaattttttcatatccaaataataaaactactttcaataagtgtaatcaaacaaagctaataagaagtgtggtacctgggcaaataaacgagcattccaatcttgattttcataaacattgcatttcatgagatcttgtctggtttgagcaacagctggattacctttccagtaagcataaggctctctgttcagccatggtatcctcgtagtgccttctttcaaccctcccaacaaaatatgccatggctttatattaatctctgccctgtgcaccacacatacaatactttttacttatttaaaaattaaggtcgtcttaggggtgattgtcaattttcaattttccgttttaaaatataatttcgaaatacaaacatgttcaaaaaaaattgcactaagttgatttttttctgaaatggtttttatcacatttaacaaacaatttattgattattgtttatgttttaacctttactgtctattacaattttactttttggggttattcggtaaatgaattccttttcttttttttttttattttaaaaaagacaattgtgtttttgtttgttctattggaattattggaccccgacattcgatttctagaaaaatagtttctcctttgtatattttgttcacattaattaattcgtgtgggaagtaaccaaaaccaaaaaacaaaacaagtcaacaacaaccaccacccaattatgaagcaagtgtagagtctaaatccatgggcattataagaatgatcagggacttgtgttaactaccccaattaggacaatattctaactatggtggttgtgaattttttttataggacaaagaaattaatggtgcagatggcgtcaacaaattccaatcaggggaagaagaggaagataaggaacagtgcagtccagtatctgttttagacccacccttcgatgacgatgatgatgggcatgatgatgaccatgaaggggatggttttgatttggactgtagctatgccaatgtacaaagtatgtcatagtttaaaaatattttattttattttgtagcattttatgttgtgtggtcgtcttccatcaacatgccatcgtacacgcttcttcaaagttgattgtctgttacaaaataccataagctgagatgttttgtgctaatgccacctatctttggtgggttccattggaagattgcaatagctcatcatccaacatgcatttcgcattcaatgtgaaattggactactctttgttcagagctataaatttcaacatgacccacaaattatgttcattctcattcttggcgctgttagtctagtgtgaaaaccgacaaattcagtttcctgttatatatggcactgtatataaaaaggaaataaaaaaagtagaatttgattatggctaatttcacccggccattatatttattacaagaaaacctttagatacaaattattttttttgtacttttagcttggtcgtaaacattaacgttacatcacgcacacacacataaaaggcaaatcaaattattttatatccctaaattttatgaggaaggatgctataaatattaacaatacatctcacacacacaaagacatctaaaattatatcactaagttttatgatgtgttacggtttgctttaaaatatggtacaaggtttatcagagaccggcttataagtaaaaattaaatttgtcataaagggagtaaaatggaaaataattaatttcttaattagaattaaattagaataagctgtgcagatcttataatttttgttcactaattcgcccaccacataatgttttaatatttccaactttgtataatctaaaaagtataaaaatgaagattacgactttcagcctccagttccttttaatggaagaagtgagtaaatgttgatgcgatatcggtagctttcatgggcagtgaccttgtcaaagaatgcttgggccatgatcattggttatctatggatatctcatcaaagttcttggagagtcaagtcttgtatgcagccacgagtcacgactttaattaacacgaaagaactaattattcacttcaatggttagtgactaaaattaaatataagtttttttcctattaaaccacgttttcttgaaccactagtcccccatttttggaaacaagaatgtgatacacagaattgaacaactagttgatcttaattacaaatatgctcaatatgcaaatatgtacatcccaaaacagaatttaaataagactctcaaatttgaaaaaagaaaagaaagaaagaagatagcaatgactacaatgcaaattgaacaacctggcaatacaatgatacaacatcggttgtaagcaacactaaacagtgatactatacgaggaaaaagattgaagtttgaaccacacatgatcaaggaaatgaaaatagacatgccgccatgatctacaaataagcaaaggagcaatcactatccaatatattaatgataaatacatcaattataggaaaagggtctaatttaaagactatttcagttaaaaaatatataaaaaaagattatttcgttcatatctttctatttaattttgatcaattttttaattcacaaaataatattctcttatgtatgaaaaaagactagatttaatcatcattaattggaatgattgttgtgtgatctatttctaattgtatttgaacatgaatattattttctttatcatataaaaattatttagtgatataaaaagaagtttgaaaaagaatattaactttttttctaaaaaaaaaattagtagaatattttgtattttttacacgtcatcaacttaaataataggagaaacataattttaattttcattgtaatttttaaataattttaattgccaaatttaagcaatcataaaattactcatgttcaatataatattctaaaaaaaaaatacatatgataacttaaataatctactaagaaatattttagatcacaatatagaattgcttaaatcaatgaaattttattttaagaaaatattaataatttttttaatactttaaatcaaaggtaattaaatttggtttaattagtcttcaaattttaactattatttaaatcaatcctttcgttacacctttgttaagtaaatgatagcatagcaagcaaggaggtgcaagcagtaacactctcacaaagataaagatctgtaagccatcattttttttttccttttcttttctatgaactgtcatttcttatctctataatggaatgtctagaagttgaaaattacttgagctttctttacctatactgctttccattttggcgaactgcttttctttctcataatgaactttccacttccaatgatggttgaacattaataattcttcatctattttgtctaaaaatttccactcactttttgttattggtgttaatgtcatgcagacaaatgatgtccaagctccactttttccattcattgcaagttgtaagcagaatgtagaatgtacgtataataaaataatgagaatggcaactgctagtactacttaattagaacaaaagtatcaaaattaaaacgaaaataactttgatgctgttaatatatgagtttaattttgatagatagtgtaaaaatttaaattattaattaattagaaatcaccaaatgatttgtaaaacaattagtaaaaaagttataggaaatatgtataattagttaattgcaaatgaaagtgtatttaaattaaattcttaattaacatatccttattgtgatattttgtatattttttatttaattgagacagtggaatgagatcgcactataattttcatcacgggtgtggttgtccaatataatagggatggttggtgaggaattttggaatgttagttggttttagactatatatcctcttgttcagttttcacattcttgttggttaatttaaaaatcgagatgatactggataaatctgaagtcgtgtataacactttcagattgaatcaaatttcggggttcaaccaaaattgttcaatcagataaaattagaagattataattcaagagttttgttttggtcttgtatattttgtcacccgttatgctttctgaaccagaatgattatttatgataaaagaaaatgtggtttttggcggttgatgtaagttatttctttttaaaaattatcgttgatggaagttttagtaacttccatgtaactttcaacatttgcctaaaccgaacatctcgttattacattaaaacaagcgtgcactcttattttaacattaaagagatcaattacactaaaatgtccaacaaacctcccccattttagtgtaattaccgatcaaatcaccaaagtcataacatacaacaaactactgcatagatgaaatatcgtgacgattgaatttcatcttagcaaattacacgtttcaaatattcgaatatcagggtgtcactaaggattgaaccctttctattcataatgaatacatgaagataatctgcacaatagtttataacattactcttgctcgacactagtttactagcctgtgtccctatccttcataagcatatcaaagccaagtcccagcttcttgaagcggctaaacttcgtgcttatataggtagtcattttctttcttgcacctgcaaatgcaatttttcaaaagaaccattgagaagttatacttcaacctccttaacttacagaaccgaacacatatcttttgggatactttcgatgatgtgttccaatctctacatgttaagctttccacattgaattcagcacctaatgtcatattagatgggaattgggtatcttaacataagagatttcaaatggactttaatcctaatcccacagtcgaccttttcacgagatctctacttaaccctttggttaaatgatcggccaaattatgctgagttctcacaaactccactgatatcacaccatgcatgattaactcccgaaccatgttgtgtctaacacccaagtgtctagacttcccattatacacttgactatatgccttagccaaagtagcctgactatcacacctgatagacatgggaggtacaggtttgggccataatggaatctcatagatcagatttcttagccactcagcttctttaccagctgctgctaaagctacaaattcagattccattgttgaatttgtaatgcaggtctatttcttggatgcccaagagatagcacctcctccaaggaggaatacccaaccacttgtggatgaataatcctccatattggttatccaacttgcatcagagtaaccttcaataaccgaaggaaatccagtatatgtcaaaccatagtcaatggttccctttaagtacttgaatactctattcatagcttgccaatgatgagaactaggattacttgtaaacctactaagtttagcaacagcataagctatatcaggcctagtactaatcattgcatacatgagtgatcctatcgcccttgagtattcaagttgagacactgctacacctttattaggtaatagcttcaagttaggatcaatgggagtacttaccgaagaacaatctttaaaattaaatttctccaatatcttctcaatataatgtgattgagagatggaaattccattgtttccacgtttgatctttattcctaagatcacatccgcctcccccatatctttcatatcaaatttagaagacaaaaatgccttagtttcatcaacttgatcttggtcgataccaaagatcaacatgtcgtctacatacagacaaatgataactcctttgccatgagtatcaaacttgctgtatagacatttatctgcttggtttataacaaaaccactagacaacacaacctcatcaaattttttatgccattgcttaggcgcttgtttcaagccataaagagatttcatcagtttacacaccttattttcatttcctggcataacaaacccttcaggttgtttcatgtatatctcttcatccaattcaccatttaagaatgcagttttcacatccatttggtgaatcaccagattgtggatagcagcaagtgctaacaacagtctaatagtggatatcctagcaacaagagcatatgtatcgaaaaaatcaataccctccttttgcctaaagccttggataaccaatctggctttgtacttgtcaacagtaccatccgctttcatctttctcctaaagatcatcttacatcctaatggcttacatccaggaggtaagtcaaccaatttccaggtattattttgcatgatggaatccatctcactttggattgcttctttccagaatacagcatcccttgaagccattgcttcactaaaagtctttgggtcttcctcaacattaaggcaatattgatattgaaattcaatatcattccttgacccttcaaccaaatagagttaaaagtcatccccaaatgacttagcctttcttactctcgtactctttctagtttcagtactagttgaaggtatatcctcaatattaactgagactttcgacatggaattcatgtcctttggcctaggtatagatgtaaacctttgttcatcaaagatagcatctcgtgactctataaccgagttcactgcaacagaatcattagattccagcacataaaatctatatgctttagaatgttcagcatatccaataaatatgcaatctatacctctttcacctatggttttccttttaggttctgtaagcctgactacagccctacatccccaaattttgagataactcaaatttggtgtatttttgtgccaaagttcatatggggtaaccttattccttttgttaggaattcggttcaacaagtaacaagctgtcaacatagcctcaccccaaaatccttcacttaaacccgaataggataacatggaatttaccatttctttcaaggttctattcttcctttcggctacaccattctgttgtggtgtatagggagctgtagtttgatgtattattccagtagattgaaaataaaccggatcataatactcacctcccctatctgtacgaagagttttgattagcccattttgatgaagttctacctctttcttataaattttaaatttatcaagagcttcatcttttgtatttaataaatatacataacaataccttgatgcatcatcaataaaagtaacaagatattttttatgacctaatgatggagtagcatgcaaatcacataaatcactatgaataaggtctgagactttagtctcacttttaacatccttaaaaggtttcctagtggtcttggtcaacatgcaagttttgcatttttcaatgttcatatcaaaaggaggaatcacacttgtttttgacatatcttttaatcttttgtaatgaacatgtcctaatctagcatgccaaatttctgattttgtcatattagttatagaactacacgaggccatacaaacagattcatgaacaaaaggaacattaatgtttaatttaaacattccattacaacgataaccaaatccaacaaacgaaccatatcttgacaagatgtacttgtcactttcaagtacttacttgaaaccacaattatttaaaaccataccagacaataagttcttacgaataccaagtacaattaagacattatccaaatacaaactttttccggaagtaaaaactaaattcacacaacctaatcctaggattggttcagttgcaacattgcccatcttcacaatagagccatcatcgattggtctaaattccttgaaccaacgacgatccttgcacacatggcttgttgctcccgaatcaaaccaccaagcaacgccatcatcctgcacatagaatgcatcaaatattagtgatacataatttgaattcgtattcgaattaaaattattcactacaatctgaccttgttgcttttcaggatcattagacccacttggaccagccttgttctttcctttgaacacccggcaatccctctttaaatgaccaggtttcccacacttccaacatgacaattttgtctgtttgtttggacctttgttcttatttccttgaaattttcgtttgttacctttagcattataattttgcttaactgttccactttcctttaccatattaatggaagaggaacctgctacgtttttatcattgactttgtcaatttcctgagccctcagcgactcctcaatcatgaaatgactaccgagttgaaccagagtcaactcttccttcttatgtttcaaggtatgcttgaagtcttttcaagaagaagacagtttatcaattatagatgaaactacaatggattcatccattttcaaatcatgttgagtaaactgacccaaaatccacaacaattcattatattgttccataacaggcctcgaatcaatcattttgtaattaaagaaattactaactaagaatttgttacttgaggcatcttctgccatatacttggattcaagagattcccataattccttagcagactcaacattttgataaatatcaaagagagagtcagacataccgttcagaatgtgtccacgataaatgtaatcgttgttctcccatttcgaacgcttccttgtttgatccagagtttcgtcttccatatacatcggcatcggtgtactcagcacatacaccacattcaatgttgtcaagagaaagtgcatcttcttctgccatcttctgaaatcttgcccttcaaacttgtccaacttcgcaaacttgcttgtcatcttcgaactatcgttcgtcatctcgaaaaatttgattcaatcttttgttggttagtttgaaaatcgagatgatactggataaatctgaagtcgtgtataacactttcagattgaatcaaatttcggggttcaaccaaaattgttcaatcggataaaatcagaagattataattcaagagttttgttttggtcttgtatgttttgtcacccgttatgctttctgaaccagaatgattatttatgatcaaagaaaatgtggtttttgacggttgatggaagttatttctttttaaaaattgccgttgatggaagttttagtaacttccatgtaacttccaaccgttgatggaagttttagtaacttccatgtaactttcaacatttgcctaaaccgaacatctcgttattacattaaaacaagcgtgcactgttattttaacataataaagagatcaattacactaaaatgtccaacaattctcattagagttaagttgcttttggggaagaaccaatgtcttgaaattccctcttcaccagaagcagttttattgtgtctctatcgaagtcatcttctccagggacttgcctttaactttgaagataggaaatagatcagtcaaacattgtttcagtttatttggattttttttgaaggacatgtgatttacaaagacttcttacaactcacaacctttggaatttctctatgcctggttaacccacaatttcggcgcctgttgcggttaggaacataggctagcaaaaacactaatcatttcaagagaaatgttaacacacttttctaatatattatttttttattttaaaatttattaaaataaaaaaattatatgtttatccatgaacactaagctctagacaaaaaaaaaaaaaaaaaccacgagaaatagtatataactctttagtggacaattggtgttgtacaaaattgaaatgatccagactaagtcaagaaactggtcttcttcattgaactcacagtgaaaccacagaatttattttcatctactagtttccttcccaattcccatgttttctaaaacataacacactacagaaccttctaataaattaaaacaaaaaaaccaatattttacatgtagcaccacaacctaacaatttctacctacaactttttctatagactataatataatctatctccactcattcattcatcaagattgagaaatggattcaaatgcttgtctaccacacttgctagtgttagcaataacattggtattggttagtcatgcaatgggagattcagctaaagacaaacagagatgtgcagaatccctgacaggtgttgcaacgtgtctgccatatttgggtgctgacgcgaaagcacccacagcagattgttgcagtggtctcacacaagctaaaagtaccaaaaaataactcaaatactacctatatattaccattttcatatcacgttgaaatgtaaaccattgattagttgatagtgtaaaaaatatttacactcttgagtgtactaaatctctgacagactcacaatagatattattgcaaaacctttcggagatttattttttgtttttaatactagcctagagtctacagatcaaagttaattaattgctgaaaattatgttcattctcattcttggcgctgttagtccagtgtgaaaacggaaaaattcagtttcatgttatatatggctctgtatatgaaaaggaaattaaagaaaaagtagaatttgattatggctaatttcacgcattatatttattacaagaaaacctttagataaaaattattttttggtacttttagcttggtcgtaagcattaacattacatcacgcacacaaacataaaaggcaaaccaaattattttacatccctaaattttatgaggaaggatgctataaatattaacaatacatctcacacacacaaagacaactaaaattatatcactaaattgaggtggggatagttttgaaaaaaaaaatagtaggtgtggttgtgtaggtgtgtttttatgtttttcaattcaggatattaaatttacaaataattttatgcttttcaattatattttaacaataattaagaaataaatctaaatcattctacatttgtttataggtacttggcatattggagatgctatatgggaatctaaattttgcttaacacaaatgtggtatatgcaaggaaaaatcaaattgaaaattttttaaccaccacttcaaattttaaaagattcgtttccaaataaggatatgaagaacaaattgtttttacagaacattccctccatgatgttttcctttccttaaagtgttcaatatttcgtaatcttcataattaattcaaaattctcaaaagattagtatatgaccttttttcttgtttgtactaggagaggaataaatgaaaaaaattcagaaatttgtggattgcaatttgctcaaatgatgtgtctattagttctttgaaatttgtattggtcatatttatttttaccttttaatagatatattgtgctgtcatcccaagaaaaggatcaaacattgatgatgcagaggtgctaagatattgcaagaagaatcttgcatctttcaaagtccctgaaaaggtcttcattactgattctttgcccaagactgccaccggaaagattttgcgtcgtcttgtggcagaacacattgtctctcaaatttgagcaactgatcaagtcctacttttgaagcctccatacctggccatacatagttggagtccacacaccataaatttcaacaataatttggcaacttggcatttaagaggagggtaattctgcaaatggtctttcattcaggatacaatggattgtagttttcaatggttcacgtgaaatgttcacaatgtaatgttttcaatgttttataggtcttaaataccaatagcagacaagatcatgcttatgcttttttgctatcgtgctcctgttccttcccactggtctnnnnnnnnnnnnnnnnnnnnnnnnnnnnnnnnnnnnnnnnnnnnnnnnnnnnnnnnnnnnnnnnnnnnnnnnnnnnnnnnnnnnnnnnnnnnnnnnnnnnnnnnnnggcatacaagaatgcattcattatctcaagtaaataaaattcaagcgaatatgtgatttggattagagaatagtattatccagtgcacactaaattggagagattcccaacatgtggtttcaaaactaaaagtacttaccaactatttgaattttaatctacgtgatctagctaatgttttctatcagagaattacaactagttgatcttaagtacaaaactatactaaatatgcaaatctttacatctaaaaacagaatttaaataaggctctcaaatttgaagaaaaaaacgaagatagcaatgactacaaattgatcaatctgccaatacaatgataaaacatcggtttattctaagcaacactaaaaagtgatactacatgagcaaaaagattgaaattattgaccatgcagtatgaatgtacagcattatttatttaatttttctaatacaattttattttatattaatacaaaaactctcacaaaacaacttcttaactactagttaattactacttttatacataaaaaaactagttaattactactgctacatagcagaaattccttaatttcacgtggtttgcctcagttgtttgccgcaggtttcagtatatccttaggaatcgtcgattgtcaaatcgttgttaaataacggcgctatatataattttagtattttgacgtttttaaatgaatttcttatttatgattatatatttacaatttttaatttcacttaaaaaaagagttttttttcgatttagagagaaaaaaatagagtttttagttaacacactgttactatatagtgcggagacaattaccccacaagcttttcattaacttgtcataatataatatatgtgaatacaaactgtccctataatttaaaataaaataaataaaaagtcaataactttataagtattgtctccacacatatatattatcctataatttacaatttttatatttattattgatgatattcttaattaaccaagtaaaaatattttttttataatttttaagataattattataaaaattaataaatttattacaaataacatttttatatgtgtaagtgcatgtatattatttattgaaatattttatttgaatttttcattaaaaatactaaatttattaacatgatatgtgcctcgttagagcagtgattcaatttaatctgatagtgagaacagaattgacagcagattccctttactgtgtgatgaaagagttgtacgaaatctttatgacatcaacccccaacatgagtggcccagtggacaagcccatcaatctaacatgtcggttgatagcacttgcataaaattttgttccttgcatcatctcatgtgtctccattctccattctctgcttccactaacgattaaacctcattgattagggttcaatgatttttcaatgaataaaattaattttaaattcttgattctaacagctcacgtattgtctgttgaatcaaatggattaaactcttgatatcataaagaaaattaaaatttgattctttgtgtaaaataaagaaatctaattaattatgcttgttatgttactatatcatttttccggtgtggaataacatcaaaatcaaagtaacaaagttacttgcatgttactctaactgttatgaatcaaccatcagacaattcaaaccatgaggaggcaagcactaacataataggagcaggattgctgagttggcattgcgggattgggcccttggatgatcctgtcgggaatatgctttttctgttaggataattgttgcaattatgttattgctagctttctctagaacctgcaaaaaaggaacgaataattagtaaatgaagcttataaattgccaacccatgtaatgaatttgcaagcagaaatcaaagttttctttccttatcttatccctttctttggaggaattctgggccccgaactccagaaacaccagcactcataacactaaccataattccagctaagtcgaatatggtttcatgttttgtaaaacaatttagatcccctttatcaaagtgtatctgtcttttacacaagttttttcactttattttatttccctcagaatcaattgttgtgttattcgtactattaaattagtccgataactaccatgtcgatcattgttagttttatttccaccattgttcggagtaagtatatactattactttatgattaaacgtgttatttaaattgcaaataaaaactctttataatgaagtacaattgtttataactacaacaattatattgagtcaatttaacactcatcaaaggcagaaaagctttactttaagattagacagaggctcataccaatcatggcggtggttataattacacacatcagcaactgtaaaagatcttgcacagccacagaaaaaaaaatgcttgatgcacatctgataaactcactcaaggtctatgtattaatagtgtaaaagagagactgaatattaaatgataaaaatataaaataattgttttgtattggcagagtacacatatatatgcccaaatgtagattcaaagttcaaacattttgggcctagatcatccctcctagtcatagccatctgaattggatcgaccccaccccaaggtttgtgttgcatcacttgcatgcattcacccaccacagttgttatagttttctcgtgatttttgtattggaaaatactatggacaaatataattgatacagtcatgttgcaattacaaagactcctcaaagaatatgtttagtaaatcatgatcaagtagaaattgcaatggcaaactgttttttaaaatcttattagtcagttgtataaacccaaatttagatatattcaggtatgtaatatttgccattttagtgctctgtttggaaatttgcgtgtcgaaatgttttttttatacgtacctacacaacactctttagccaaataccactgttcatggaggaatctgtcctgaaaggagtatagaaccagaaacaatatgcgtggtggtatctatcattctgaagaagagaaaaagtgggatacgtacaatagtaggactgtgacactactagaaaaatgnnnnnnnnnnnnnnnnnnnnnnnnnnnnnnnnnnnnnnnnnnnnnnnnnnnnnnnnnnnnnnnnnnnnnnnnnnnnnnnnnnnnnnnnnnnnnnnnnnnngattcaggtatcgtttatgaatttgttttatatggagtgtaaagtcatcataccaatactaataagtgtatgtttatttaattctttttaaaataactactcttctttatttacatctaataaaaatgttatcacattaaaatttttaaaataagctaaatgaagcgtgtttcataagaaattaacttttactgtaattgttacattttttagtgacaaagggagatgggtgaagacggtgaaggaaaaaaaaatgaagataatgtctatgttgttcaaataacaatattaattgtattaaaatagttaatattaaaaaatatattagtaaatataacattgttgtgttggtgctatttattgtgcatcaaaatatgtaaaaataataattaacttgtaatttgtatagttggtatgggttgttttatctatcctggattttgttgtatcacacatataatcatttatatatatatgggctactattgtcactaccaaaaatgctattgagactaccaaagcatttgaaattacttggttatccttagttccatttccccacacctcctatccttcccctctttacgttcagctactctccctctttacatccaaaaacagaatttaaataaggctctcaaatttgaaaaaaaaaaaaaaaagatagcaatgactacaaattgatcaacctgccaatacaatgataaaacttcggagtattctaagccacactaaacagtgatactacctaagcgaaaagattgaagtttgaaccacacatgatcaaggaaatgaaaataggcataccgccatgatctacaaatcagcaaaggagcaatcactatccagaatcccacaataaatccaattgtcatactgacaaaaaaccaatttactccatgcccatcacttccttcataactatgggttttcccattggagctgcagtttatgggcagtggtggaccacatagattgttgccgatgaagctggaggcatcaaaggtttgcaattgagttcctgttggaatatttcccttcaaatgattataagacaagtctagcatgctcagaaagctcaaatttgcaatggttggagggatttcaccagaaagttgattcctcgaaaaatcaatggactgtaatgatctcatattacctataccttgtggaatatgaccaatcaattggttgtgggacaagtttaaaaaattcaatccatttagatatgtgatttctcttggtatttcccctaataacttgttacttgacagatcaatgcttgttaccaaacccagaatgtttctgtactcatctcctcttcctttcagccatagtagcacactaactatactttccatggaagagtaagacctaccatatcgtgctatagaatagatacgaggatctgtactttggttcannnnnnnnnnnnnnnnnnnnnnnnnnnnnnnnnnnnnnnnnnnnnnnnnnnnnnnnnnnnnnnnnnnnnnnnnnnnnnnnnnnnnnnnnnnnnnnnnnnncagctgggtatattgccagacagattgttttgtgcaaggtctaaaacctgaagatgactcatctgacatatttcatttggaatgtggccgccaaatctgtttgatcgaaggcggaggattttcacatttaagaggttttctccaacccatgttggaatacttcctgaaagattattttccccaaggtccaaggatatcaattggttattcttcttcaaactggttggaaatattcctgagagtgtgttgttatgaatttgtaaagactgcagctctgccaaggaacccatggattggggtaagttcccaacaaaatggttgctttgtaaatttacatccacaagagatgtccaatccatccagcaatcaggtatctctcctgacaaattatttgatgcaagattcagaaattctaattgcattggctcgtcctgatcgttacataaaaagtcattcatggattcagagaatgaattgcttgaaagatccaactgaagcacattacttgaaagatagggtaatttaccacacaagtgatttgagcttagatcaatagttgggatagatattggattctttaatgtagtcccaatctcaccatggatatgattacgagagaggtttaaatacaaaacctgagaaagtgcttcccacatctgtgtggaaatagaatcgaaaatccccgtgttagatagtccaacatattcaagtttgttttgtgactgaatccacaatggaaagctgggacctaacggccatgatgtcacttccaaataggtaagttgaaaattaggaatccaattgggacccacttttaaagtgaaattgttccccgatgcaccaaactccgtcaagcttgtaagatttgcaagatcatcttccttgacaactctgtgaaaaagattgccatcaatatgaagagatgacaatttagagagtgatccaagactttcaaatggatttccactgaatttattaatagacagatcgagatatcttaatgatgaaagttttccaaatgatttaggaagagcaccaccaattaagttgttggaaaaatctagccgctcaatatttttaaatgccccaacatcatctgtcagattgcctgaaagtcgtgaactctgaactgcaagatttgtgagttcatgggaaatacaaggagctagaatttctaaaagttcattaacctgttggttgagtttgagatatgataaatctatcacccttaagttgcagagattacccaaagaagttggaatggttccttcaagttgattatatgacaaatcaagttcaacaagagaagtcaaatttcccaaagaagttggaatgtttccttcaagttgattgtatgacaaatcaagtttaacaagagaagtcaaatttcccagggcatcagaaatagtcccatgcaagtagttggcccttaggttcaggaacttgagacgatgaagaccatataagcaatcaggtatagaagatgaaaatgaattgaaagacaagtcaagattttgaagaagtgtgaggtttcgaataccaccaggaatcggatcgttgatttcattatatgataattgaagagaaacaagtttcttcaatttgaatatccacttggggacaaaagaaatggcaggggaataactagtatcggaaagatggagagtttgcagagatgagaagttgagcaaggatggttcattatagtgagggagtgtgcagaatgacaaatataggtgggtcaaagaaggaagagattggagagtgtgtagccaatgaaatgctttggataggtttgcataactcaaatgaagatattcaagcttccacatacttgatagccattctacattttcagcaaacagaggttcgacatcagatcacctccaaggccaagatacaccaaattggagagattccaaaatctgagatggaatcttccccatgaatccagtaccagagaggtcgaggtgagtcaaggaagtcattgtcccgaggaaagaaggaattgacatacctcctccaagtaaataattgccgctcaagtcaagatatcgaagcttagagagattcccaatctgaggaggaatcttcccattgaatccagtatgagagaggttgaggtgagtcaaggaagtcattgtcccaaggaaagaaggaattgacataccttctccaaggaattcattggcgctcaagtccaagtaattcaaatgctttaaatcagccaaacaaggacttatctctccaccaaagctccatctcctataagcttcctcatcgaagtgagagtagctatcatagtaatgatagaaaacagaatctgaggtgtggaggtgaagctgaagaacatggaaagtaaggttgtggcagaggactccataccagtggcaacagttggtattattatgattccaagaccaaagcctatttgaaggatcattcagattattcttaaacttcataagtgtctcacgctcacttgggatgcacacactctctctgcatggtaagctcaacaaccaaagctggacaaagacaagaatataaatggaggaagaattcatgatcatgcaagaatatatagaaaacaagtgtagttgttggttctgcatataaatcatcaaacttctattatttatactgctgccctgcctgtttttttcttcactttcattattttttaccttttttattattgtgccaaatactaaattattctttcattcttttttttacgctggcctctttaaattatcaatttaattatccaattctcccgaattattctcccgaattaattttgatcaatttttcaattcacaaaataatattcttcttatatgtgaaaaagactaattaatcttcattgtcattaatgattgttgtgttgtctatttctaattgttttttaatcataatattattttctttttattaaaaattaattagtgagatacaaagaagtttaatttgatctatcataattattgagatcatagtttttccttttataagtcttggtccaaatttctccatgtattgtagatcatatttaacttaaaaagtaaattagaagatctacaaagaagtgtgacatgttttttaaattataaaattatggtcctagctatttattgttagaccacaagttttcatatattaaagtttttgtctaaatttcatttatggtgatagtttacgaataggatagaagacaaaaataaatattcaatttattgaaatatctaactcaattaattgatgaatacatcaattataggaaaagggtgtactttaaagactatttctattaaaaaatctataatttttttttccttccaatctaattatttaattttaatcaatttttcagttcacaaaataatattctcttatataggaaaaaaagactagatttaattatcatcaattggaaaagttattgtgtcatctatttatagttgtattctaacttgaatattattttatttatcatataaaaattaattagttatataaaagaagtgaaaataatattaactttttttctcaaaaaaaaatcagtatcatattttatattttttacaagttatcaacttaaataagaggagaaacataattttaatttctattttactttttaaataattgcaagtgtcaaatttaaataatcatgagaatactcacgttcaatataatattctcaaaaaaaaaaaatccatacgataacttaaacaatctataaagaaatataatttattcttgtgccaaatactaaaacaagaaacattttttattttagtttaccgtatagaattgcttaaatcaatgaaatttttattttaagaaaatattaatgatttttttaaaactttaagtagtttacatcaaagataattaaatttggcttaattagtcttcaaattttaactattattcaaatcaatcctttcgttaaacctgtacgtgttaagtaaacaacaaaaagtcttgtctcataaaattcaaacattctattacatgcggtttgaacccataattaattttaaatatcaaattttaattattcaaaataaaagaaatgaaaacaaaattgtctcctagagaaacccttgcccactccaccaaatccatatcaaggtccccacttttccaacttgaaccatagactactccatcaagtctatgtcaaggtcctccattttaaggtccccagttttccaacttgaaccatagactacttcaaccttaggacactccacaaagtccactaatattaaggtctctgccttcttcaacttctgcaacgcatatatagaaatcaacttaattgtataagtgcttcttgcttctgcatataaattataaaacttctattatttatactgctgcaagtgtctttcttgacttttttaatttttttattatgtttcctttttttaattattgactttattatccaattctcccgagttaattcttagaataggaaataattttgaatttactttatctatctccctttttaaaattcctatatacacaaaattttatattgaatttaactattatttaatctatcctttcgttaaacttttgttaattaaacaataaaagttcaacattttattaaaaaaattcaagttttctatttcatggactccatcaagtcttttattaaaagtccaacttttgttaattcaagtcttttaatactttaaatcaaaggtaattaaatttggtttgattagtcttcaaattttaactattatttaaatcaatcctttcgttacatttttgttaagtaaatgattgcatagcaagcaaggaggtgcaagcagtaacactctcacaaagataaagatctcaaagccatcatttttttttccttttcttttctatgaactgtcatttcttatctctacatgtgaatgtcatgcagacaaatgatgtccaagctccactttttccattcattgcaagttgtaagcagaatgtagaatgtacgtataataaaataatgagaatgccaactactagtacgtagtacttaattaaaacaaaagtatcaaaattagaacgaaaataactttgatgctgttaatacatgagtttaattttgatacacagtgtaaaaagttaaattgttaattaattagaaatcacctaatgatttgtaaaacaattactaaaaaaagtttcatttgaaacttagtcttccacccgtctcaagctctccacatgaaaaaaaaggttgtttgtgtcatctatttctaattgtattcaaacctaaatatgatttcctttatcatataaaaattaattattgataaaaaaagaagtggtgtaaaagaatttaacttttttctataaaaaatagtatcatattttgtattttttataagttatcaacttaaataataggagaaacataatttttattttcattttactttttaaataattgtaagtgccaaatttaaacaatcataaaaatactcacgttcaatataatattctaaaaaatatatttatacgataacgtaaataatcttctacaaataaatatattttattcttgtctcaaatactaaaataagaaacattttattttaatttacagtataggatttcttaaatcaacgaaatttttattttaagaaaatattaataattttttaaaaactttgagtagtttacagcaaaggtaattaaattcggcttaattagtcttaaaattttaactattatttaaatcaattaatcctttcattaaacctgtacgtgttaagtaaataacaaaatgtcttgtcttataaaattcaaatattctattacttgcagtttgaacccataattaattttaaaatatcaattttttattattccaaataaaagaaatgaaaacaaaattgtctagtctcctagataaaccacttcccactccaccaaattcatatcaaggaccccacttttcccacttgaaccatagactactccatcaagtccaagtcaatgtccttcattttttcatcttgaaccttaggacactccacaaagtccagccaaccatatttaggtctctatcttcttcaacatgaaccataggtcactacattaccttcatatcaagtttcatatcattgacaacaaatgtttagaattaagtaagcaaggaaaaaaattataaatgatgaatacatcaattataggaaaatgatctaatttaaatattatttcggttaaaaaaatctatataaaaaaagcctatttgaagcatctatgagattattcttaaacttcaaaagtgtctcacgctcacttgggatgcacacactctctctgcatggtaagctgaacaaccaaagctggacaaagacaagaatataaatggaggaggaattcatgatcatgcaacgcaaatatagaaaacaagtgtacttgttgcttctgcatataaatcatcaaacttctattatttatactgctgccctgcctgtttttttctccactttcattattttttaccttttttattattgtgccaaatactaaaatattcttccattctttttttttacggtggcctctttaaattatcgatttaattatccaattctcccgaattaattcttagaatacgaattttttgtatttactgtatctatctccctttttaaaattcctatatacactaaattcatgaaaaatcaaaattaataaaaaatttaatattaaattatcaaaattaataacatttttttaagaaaaaaatcaagtcttttatttcatcaaattcaatattaaattatcaaattttcaatattcaaactaaaaataatgtaaaagaaaattgtcttctaaatcatagcttacaccatcaagtcaatctcaaggttttccattttttcatcttgaacctttggacactccacaaagtccagccatgatgttaagatctgacttcttcaacttgaaccataggtcactgcattaccttcatatcaagttccctgtcattgataacaaatgttgcgagttaagtcaagcaaggaaaaaaaaatattattgatgaataaatcaattataggaaaagagtttactttaaagactattttggttaaaaaaatctataaaaaaaattatttcgttccaagctagctatttaattttgatcaatttttcaattcacaaaataatattcttcttatatgtgaaaaagactaattaatcttcattgtcattaatgattgttgtgttgtttatttctaattgtttttttaatcataatattattttctttttattaaaaattaattagtgagatacaaagaagtttaacttgatctatcataattattgagatcatagtttttctttttataagtcttggtccaaatttctccatgtattgtaaatcatatttaacttaaaaagtaaattagaagatctacaaagaagtgtgacatgttttttaaattataaaattatggtcctagctatttattgttagaccacaagttttcatatattaaagtttttgtctaaatttcatttatggtgatagtttaagaatagtgatagaagacaaaaataaatattcaatttattgaaatatctaactcaattaattgatgaatacatatattataggaaaagggtgtactttaaagactatttctattaaaaaatctataaaaaaattatttccttccaatctaattatttaattttaatcaatttttcagttcacaaaataatattctcttatataggaaaaaaagactagatttaattatcatcaattggaaaagttattgtgtcatgtatttataattgtattctaacttgaatattattttatttatcatataaaaattaattagttatataaaagaagtaaaaagaatattaactttttttctcaaaaaaaaaatcagtatcatattttatattttttacaagttatcaacttaaataagaggagaaacataattttaatttccattttactttttaaataattgcaagtgacaaatttaaataatcatgagaatactcacattcaatataatattttcaaaaaaaaaatccatacgataacttaaacaatctataaagaaatataatttattcttgtgccaaatactaaaacaagaaacattttttattttagtttaccgtatagaattgcttaaatgaatgaaatttttattttaataaaatattaatgatttttttaaaactttaaatagtttacatcaaagataattaaatttggcttaattagtcttcaaattttaactattattcaaatcaatcctttcgttaaacctgtacgtgttaagtaaacaacaaaaaatcttgtcttataaaattcaaacattttattacatgcggtttgaacccataattaattttaaactatcaaattttaattattcaaaataaaagaaatgaaaacaaaattgtctcctagagaaaccgctggccactccaccaaattcatatcaaggtccccacttttccaacttgaaccatagactactccatcaagtctatgtcaaggtcctccattttaaggtccccacttttccaacttgaaccataaactacttcaaccttaggacactccacaaagtccacccatattaaggtctctgacttcttcaacttctgcaacgcatatatagaaaacaacttaattgtataagtgcttcttgcttctgcatataaatcataaaacttctattatttatactgctgcaagtgtctttcttttcttttttcttttttttatgacgtttcctttctttaattattgactttattatccaattctcccgagttaattcttagaatagaaaataattttgaatttactttatctatctcccttttaaaaattcctatatacacaaaattttatattgaannnnnnnnnnnnnnnnnnnnnnnnnnnnnnnnnnnnnnnnnnnnnnnnnnnnnnnnnnnnnnnnnnnnnnnnnnnnnnnnnnnnnnnnnnnnnnnnnnnnnnnnnnnnnnnnnnnnnnnnnnnnnnnnnnnnnnnnnnnnnnnnnnnnnnnnnnnnnnnnnnnnnnnnnnnnnnnnnnnnnnnnnnnnnnnnnnnnnnnnnagtcaaagcatgaaaaaaaataagggtaaaaatatatcatttctatccctataaaaattttaatgtgctacttttttttttttatcctgagttaagtttggatgatagataattatcatgtattcttagattttggtgtcattttaggatatttatgtgatatatgtcttttatgcttttttattgtcatgaactaatcttctcttttgttggagttgaatataattggttcatttttcatgtaatgactatttttttattgaataaagcattctaattgtttctcttctatgtttaatatgtgtttttggcttaatcaccttgtttgtatgattttttttattcaattgtaattaaaaaattctttgaactacgaattgcaaaaaacacctaataatttttatgtctaggaataagataaaaagaattgagcatcaataaacactttatcttaatgaaaatcatttagttatattaatttaagggattgatagtgtaatcaagggatttaggtctcttcactaggaattaaagtgaagataatatgatgggtttatgataatataacctttattaaatatgaatgtgtagttattaggtgatagaaacttcaatgaaattaaacgccaacaattttttcattgatttaaccccaacaattacatggggtgtttgttaaaattcccaaacaattttttttaatttttttcttttattttcttctttagttttcttatttttatttcttcctttaatttctttatctttatgcatattgttatttaaatcaaattagctaatgttaattaatttcaaatattcatagtatagaaattatactttttattacccaattttattacccaattattgcctaagtcctgttaatgagtattatagaaaaaatgcacgaatagcgagagaaggaagatgtggaagggtttagaaactgcagaatcctatgcaagctccaactttctacactaattaaattcattcaggcaaattctaagttacacgttgcgtaaaacaatcttcttaaatccaatcaccgagtgtgtcattccaggtattttaatgctaatcattgttagtgcacagatagtagaagacaataatgcgtcataaatacaaaacagaatttgatgctcaagtctgaagctcgtctagttctcttaacattaagaacatttattaccaatgaaagcaaaacaaacagacaccccatacgaacatgtacatagtatggtaaaccttttcacatttttaatgtctagaataacacgttgtaatgtctctcactcctaacagttaacatgtaaactcacaatttcccaagtaaccttcttaccttcaaaactattatcacataaatcagatctctcaagtggtcaaggtaatgaaaataagcacgcctccaagttctgttaaagaaaacaacactgcaaaaaccccaaaatcctgctgcaaatccaactcccataccgatataaaactctgatgttccaaagaaattaccatcaccgtgtccaacagaagcactctctgtcaactcttccttgtctgtgcaattttttgttacaggaggaccacaaagctcaggatttccagtgtagctaagttcttcaaagctctgaagttgggtgctcgtgggaattctgcctgataagttgttgtatgatagattcaggacactgaggaaggacaaatcagataagctttgagggatttgacctgaaatgttgtttagtgagagatcaagggattctaacaatttcatttttcccatgtcatttggtatccctccagacagatgatttctagacaagttcaaaaaccgcaaagcagatagcttggaaatttcagatggaattgctccagacagcttattacttgaaagatcaatcattctcaccaatatcagattgtctctgtactctaactcatctcctttgggaactaagacaagagtttccttgtagtggttataactgaagtcagagccatatgaataacttaaagggttggcaaagaagtcatcttcaccagccattgtcttcatgtcatccaaacaatttggaatggatcctgacaggctgttattgccaagatccagcactataagggaagaaagttgacaaatcttttgagtaatgctgccattgaaattgttggatcttagacgaagaaccattagatattgcatttcccacatccaatctggtattgcgtcagaaagttggttattgcccatgtcaatgaatttcattgtagagcaattttgcagtgttgaaggaatatatccagagaagcggttgtcgtctaacaacaaagactcaagttgagatagataccccatggagtttggaatagcaccagacaaattgttactacccaagttcaaatgcaccaaagcttgccaatgcacccaacagtgaccaagatcaccagataagacattatttgaaaaatcaagcacactaaatannnnnnnnnnnnnnnnnnnnnnnnnnnnnnnnnnnnnnnnnnnnnnnnnnnnnnnnnnnnnnnnnnnnnnnnnnnnnnnnnnnnnnnnnnnnnnnnnnnnnnnnnnnnnnnnnnnnnnnnnnnnnnnnnnnnnnnnnnnnnnnnnnnnnnnnnnnnnnnnnnnnnnnnnnnnnnnnnnnnnnnnnnnnnnnnnnnnnnnnnnnnnnnnnnnnnnnnnnnnnnnnnnnnnnnnnnnnnnnnnnnnnnnnnnnnnnnnnnnnnnnnnnnnnnnnnnnnnnnnnnnnnnnnnnnnnnnnnnnnnnnnnnnnnnnnnnnnnnnnnnnnnnnnnnnnnnnnnnnnnnnnnnnnnnnnnnnnnnnnnnnnnnnnnnnnnnnnnnnnnnnnnnnnnnnnnnnnnnnnnnnnnnnnnnnnnnnnnnnnnnnnnnnnnnnnnnnnnnnnnnnnnnnnnnnnnnnnnnnnnnnnnnnnnnnnnnnnnnnnnnnnnnnnnnnnnnnnnnnnnnnnnnnnnnnnnnnnnnnnnnnnnnnnnnnnnnnnnnnnnnnnnnnnnnnnnnnnnnnnnnnnnnnnnnnnnnnnnnnnnnnnnnnnnnnnnnnnnnnnnnnnnnnnnnnnnnnnnnnnnnnnnnnnnnnnnnnnnnnnnnnnnnnnnnnnnnnnnnnnnnnnnnnnnnnnnnnnnnnnnnnnnnnnnnnnnnnnnnnnnnnnnnnnnnnnnnnnnnnnnnnnnnnnnnnnnnnnnnnnnnnnnnnnnnnnnnnnnnnnnnnnnnnnnnnnnnnnnnnnnnnnnnnnnnnnnnnnnnnnnnnnnnnnnnnnnnnnnnnnnnnnnnnnnnnnnnnnnnnnnnnnnnnnnnnnnnnnnnnnnnnnnnnnnnnnnnnnnnnnnnnnnnnnnnnnnnnnnnnnnnnnnnnnnnnnnnnnnnnnnnnnnnnnnnnnnnnnnnnnnnnnnnnnnnnnnnnnnnnnnnnnnnnnnnnnnnnnnnnnnnnnnnnnnnnnnnnnnnnnnnnnnnnnnnnnnnnnnnnnnnnnnnnnnnnnnnnnnnnnnnnnnnnnnnnnnnnnnnnnnnnnnnnnnnnnnnnnnnnnnnnnnnnnnnnnnnnnnnnnnnnnnnnnnnnnnnnnnnnnnnnnnnnnnnnnnnnnnnnnnnnnnnnnnnnnnnnnnnnnnnnnnnnnnnnnnnnnnnnnnnnnnnnnnnnnnnnnnnnnnnnnnnnnnnnnnnnnnnnnnnnnnnnnnnnnnnnnnnnnnnnnnnnnnnnnnnnnnnnnnnnnnnnnnnnnnnnnnnnnnnnnnnnnnnnnnnnnnnnnnnnnnnnnnnnnnnnnnnnnnnnnnnnnnnnnnnnnnnnnnnnnnnnnnnnnnnnnnnnnnnnnnnnnnnnnnnnnnnnnnnnnnnnnnnnnnnnnnnnnnnnnnnnnnnnnnnnnnnnnnnnnnnnnnnnnnnnnnnnnnnnnnnnnnnnnnnnnnnnnnnnnnnnnnnnnnnnnnnnnnnnnnnnnnnnnnnnnnnnnnnnnnnnnnnnnnnnnnnnnnnnnnnnnnnnnnnnnnnnnnnnnnnnnnnnnnnnnnnnnnnnnnnnnnnnnnnnnnnnnnnnnnnnnnnnnnnnnnnnnnnnnnnnnnnnnnnnnnnnnnnnnnnnnnnnnnnnnnnnnnnnnnnnnnnnnnnnnnnnnnnnnnnnnnnnnnnnnnnnnnnnnnnnnnnnnnnnnnnnnnnnnnnnnnnnnnnnnnnnnnnnnnnnnnnnnnnnnnnnnnnnnnnnnnnnnnnnnnnnnnnnnnnnnnnnnnnnnnnnnnnnnnnnnnnnnnnnnnnnnnnnnnnnnnnnnnnnnnnnnnnnnnnnnnnnnnnnnnnnnnnnnnnnnnnnnnnnnnnnnnnnnnnnnnnnnnnnnnnnnnnnnnnnnnnnnnnnnnnnnnnnnnnnnnnnnnnnnnnnnnnnnnnnnnnnnnnnnnnnnnnnnnnnnnnnnnnnnnnnnnnnnnnnnnnnnnnnnnnnnnnnnnnnnnnnnnnnnnnnnnnnnnnnnnnnnnnnnnnnnnnnnnnnnnnnnnnnnnnnnnnnnnnnnnnnnnnnnnnnnnnnnnnnnnnnnnnnnnnnnnnnnnnnnnnnnnnnnnnnnnnnnnnnnnnnnnnnnnnnnnnnnnnnnnnnnnnnnnnnnnnnnnnnnnnnnnnnnnnnnnnnnnnnnnnnnnnnnnnnnnnnnnnnnnnnnnnnnnnnnnnnnnnnnnnnnnnnnnnnnnnnnnnnnnnnnnnnnnnnnnnnnnnnnnnnnnnnnnnnnnnnnnnnnnnnnnnnnnnnnnnnnnnnnnnnnnnnnnnnnnnnnnnnnnnnnnnnnnnnnnnnnnnnnnnnnnnnnnnnnnnnnnnnnnnnnnnnnnnnnnnnnnnnnnnnnnnnnnnnnnnnnnnnnnnnnnnnnnnnnnnnnnnnnnnnnnnnnnnnnnnnnnnnnnnnnnnnnnnnnnnnnnnnnnnnnnnnnnnnnnnnnnnnnnnnnnnnnnnnnnnnnnnnnnnnnnnnnnnnnnnnnnnnnnnnnnnnnnnnnnnnnnnnnnnnnnnnnnnnnnnnnnnnnnnnnnnnnnnnnnnnnnnnnnnnnnnnnnnnnnnnnnnnnnnnnnnnnnnnnnnnnnnnnnnnnnnnnnnnnnnnnnnnnnnnnnnnnnnnnnnnnnnnnnnnnnnnnnnnnnnnnnnnnnnnnnnnnnnnnnnnnnnnnnnnnnnnnnnnnnnnnnnnnnnnnnnnnnnnnnnnnnnnnnnnnnnnnnnnnnnnnnnnnnnnnnnnnnnnnnnnnnnnnnnnnnnnnnnnnnnnnnnnnnnnnnnnnnnnnnnnnnnnnnnnnnnnnnnnnnnnnnnnnnnnnnnnnnnnnnnnnnnnnnnnnnnnnnnnnnnnnnnnnnnnnnnnnnnnnnnnnnnnnnnnnnnnnnnnnnnnnnnnnnnnnnnnnnnnnnnnnnnnnnnnnnnnnnnnnnnnnnnnnnnnnnnnnnnnnnnnnnnnnnnnnnnnnnnnnnnnnnnnnnnnnnnnnnnnnnnnnnnnnnnnnnnnnnnnnnnnnnnnnnnnnnnnnnnnnnnnnnnnnnnnnnnnnnnnnnnnnnnnnnnnnnnnnnnnnnnnnnnnnnnnnnnnnnnnnnnnnnnnnnnnnnnnnnnnnnnnnnnnnnnnnnnnnnnnnnnnnnnnnnnnnnnnnnnnnnnnnnnnnnnnnnnnnnnnnnnnnnnnnnnnnnnnnnnnnnnnnnnnnnnnnnnnnnnnnnnnnnnnnnnnnnnnnnnnnnnnnnnnnnnnnnnnnnnnnnnnnnnnnnnnnnnnnnnnnnnnnnnnnnnnnnnnnnnnnnnnnnnnnnnnnnnnnnnnnnnnnnnnnnnnnnnnnnnnnnnnnnnnnnnnnnnnnnnnnnnnnnnnnnnnnnnnnnnnnnnnnnnnnnnnnnnnnnnnnnnnnnnnnnnnnnnnnnnnnnnnnnnnnnnnnnnnnnnnnnnnnnnnnnnnnnnnnnnnnnnnnnnnnnnnnnnnnnnnnnnnnnnnnnnnnnnnnnnnnnnnnnnnnnnnnnnnnnnnnnnnnnnnnnnnnnnnnnnnnnnnnnnnnnnnnnnnnnnnnnnnnnnnnnnnnnnnnnnnnnnnnnnnnnnnnnnnnnnnnnnnnnnnnnnnnnnnnnnnnnnnnnnnnnnnnnnnnnnnnnnnnnnnnnnnnnnnnnnnnnnnnnnnnnnnnnnnnnnnnnnnnnnnnnnnnnnnnnnnnnnnnnnnnnnnnnnnnnnnnnnnnnnnnnnnnnnnnnnnnnnnnnnnnnnnnnnnnnnnnnnnnnnnnnnnnnnnnnnnnnnnnnnnnnnnnnnnnnnnnnnnnnnnnnnnnnnnnnnnnnnnnnnnnnnnnnnnnnnnnnnnnnnnnnnnnnnnnnnnnnnnnnnnnnnnnnnnnnnnnnnnnnnnnnnnnnnnnnnnnnnnnnnnnnnnnnnnnnnnnnnnnnnnnnnnnnnnnnnnnnnnnnnnnnnnnnnnnnnnnnnnnnnnnnnnnnnnnnnnnnnnnnnnnnnnnnnnnnnnnnnnnnnnnnnnnnnnnnnnnnnnnnnnnnnnnnnnnnnnnnnnnnnnnnnnnnnnnnnnnnnnnnnnnnnnnnnnnnnnnnnnnnnnnnnnnnnnnnnnnnnnnnnnnnnnnnnnnnnnnnnnnnnnnnnnnnnnnnnnnnnnnnnnnnnnnnnnnnnnnnnnnnnnnnnnnnnnnnnnnnnnnnnnnnnnnnnnnnnnnnnnnnnnnnnnnnnnnnnnnnnnnnnnnnnnnnnnnnnnnnnnnnnnnnnnnnnnnnnnnnnnnnnnnnnnnnnnnnnnnnnnnnnnnnnnnnnnnnnnnnnnnnnnnnnnnnnnnnnnnnnnnnnnnnnnnnnnnnnnnnnnnnnnnnnnnnnnnnnnnnnnnnnnnnnnnnnnnnnnnnnnnnnnnnnnnnnnnnnnnnnnnnnnnnnnnnnnnnnnnnnnnnnnnnnnnnnnnnnnnnnnnnnnnnnnnnnnnnnnnnnnnnnnnnnnnnnnnnnnnnnnnnnnnnnnnnnnnnnnnnnnnnnnnnnnnnnnnnnnnnnnnnnnnnnnnnnnnnnnnnnnnnnnnnnnnnnnnnnnnnnnnnnnnnnnnnnnnnnnnnnnnnnnnnnnnnnnnnnnnnnnnnnnnnnnnnnnnnnnnnnnnnnnnnnnnnnnnnnnnnnnnnnnnnnnnnnnnnnnnnnnnnnnnnnnnnnnnnnnnnnnnnnnnnnnnnnnnnnnnnnnnnnnnnnnnnnnnnnnnnnnnnnnnnnnnnnnnnnnnnnnnnnnnnnnnnnnnnnnnnnnnnnnnnnnnnnnnnnnnnnnnnnnnnnnnnnnnnnnnnnnnnnnnnnnnnnnnnnnnnnnnnnnnnnnnnnnnnnnnnnnnnnnnnnnnnnnnnnnnnnnnnnnnnnnnnnnnnnnnnnnnnnnnnnnnnnnnnnnnnnnnnnnnnnnnnnnnnnnnnnnnnnnnnnnnnnnnnnnnnnnnnnnnnnnnnnnnnnnnnnnnnnnnnnnnnnnnnnnnnnnnnnnnnnnnnnnnnnnnnnnnnnnnnnnnnnnnnnnnnnnnnnnnnnnnnnnnnnnnnnnnnnnnnnnnnnnnnnnnnnnnnnnnnnnnnnnnnnnnnnnnnnnnnnnnnnnnnnnnnnnnnnnnnnnnnnnnnnnnnnnnnnnnnnnnnnnnnnnnnnnnnnnnnnnnnnnnnnnnnnnnnnnnnnnnnnnnnnnnnnnnnnnnnnnnnnnnnnnnnnnnnnnnnnnnnnnnnnnnnnnnnnnnnnnnnnnnnnnnnnnnnnnnnnnnnnnnnnnnnnnnnnnnnnnnnnnnnnnnnnnnnnnnnnnnnnnnnnnnnnnnnnnnnnnnnnnnnnnnnnnnnnnnnnnnnnnnnnnnnnnnnnnnnnnnnnnnnnnnnnnnnnnnnnnnnnnnnnnnnnnnnnnnnnnnnnnnnnnnnnnnnnnnnnnnnnnnnnnnnnnnnnnnnnnnnnnnnnnnnnnnnnnnnnnnnnnnnnnnnnnnnnnnnnnnnnnnnnnnnnnnnnnnnnnnnnnnnnnnnnnnnnnnnnnnnnnnnnnnnnnnnnnnnnnnnnnnnnnnnnnnnnnnnnnnnnnnnnnnnnnnnnnnnnnnnnnnnnnnnnnnnnnnnnnnnnnnnnnnnnnnnnnnnnnnnnnnnnnnnnnnnnnnnnnnnnnnnnnnnnnnnnnnnnnnnnnnnnnnnnnnnnnnnnnnnnnnnnnnnnnnnnnnnnnnnnnnnnnnnnnnnnnnnnnnnnnnnnnnnnnnnnnnnnnnnnnnnnnnnnnnnnnnnnnnnnnnnnnnnnnnnnnnnnnnnnnnnnnnnnnnnnnnnnnnnnnnnnnnnnnnnnnnnnnnnnnnnnnnnnnnnnnnnnnnnnnnnnnnnnnnnnnnnnnnnnnnnnnnnnnnnnnnnnnnnnnnnnnnnnnnnnnnnnnnnnnnnnnnnnnnnnnnnnnnnnnnnnnnnnnnnnnnnnnnnnnnnnnnnnnnnnnnnnnnnnnnnnnnnnnnnnnnnnnnnnnnnnnnnnnnnnnnnnnnnnnnnnnnnnnnnnnnnnnnnnnnnnnnnnnnnnnnnnnnnnnnnnnnnnnnnnnnnnnnnnnnnnnnnnnnnnnnnnnnnnnnnnnnnnnnnnnnnnnnnnnnnnnnnnnnnnnnnnnnnnnnnnnnnnnnnnnnnnnnnnnnnnnnnnnnnnnnnnnnnnnnnnnnnnnnnnnnnnnnnnnnnnnnnnnnnnnnnnnnnnnnnnnnnnnnnnnnnnnnnnnnnnnnnnnnnnnnnnnnnnnnnnnnnnnnnnnnnnnnnnnnnnnnnnnnnnnnnnnnnnnnnnnnnnnnnnnnnnnnnnnnnnnnnnnnnnnnnnnnnnnnnnnnnnnnnnnnnnnnnnnnnnnnnnnnnnnnnnnnnnnnnnnnnnnnnnnnnnnnnnnnnnnnnnnnnnnnnnnnnnnnnnnnnnnnnnnnnnnnnnnnnnnnnnnnnnnnnnnnnnnnnnnnnnnnnnnnnnnnnnnnnnnnnnnnnnnnnnnnnnnnnnnnnnnnnnnnnnnnnnnnnnnnnnnnnnnnnnnnnnnnnnnnnnnnnnnnnnnnnnnnnnnnnnnnnnnnnnnnnnnnnnnnnnnnnnnnnnnnnnnnnnnnnnnnnnnnnnnnnnnnnnnnnnnnnnnnnnnnnnnnnnnnnnnnnnnnnnnnnnnnnnnnnnnnnnnnnnnnnnnnnnnnnnnnnnnnnnnnnnnnnnnnnnnnnnnnnnnnnnnnnnnnnnnnnnnnnnnnnnnnnnnnnnnnnnnnnnnnnnnnnnnnnnnnnnnnnnnnnnnnnnnnnnnnnnnnnnnnnnnnnnnnnnnnnnnnnnnnnnnnnnnnnnnnnnnnnnnnnnnnnnnnnnnnnnnnnnnnnnnnnnnnnnnnnnnnnnnnnnnnnnnnnnnnnnnnnnnnnnnnnnnnnnnnnnnnnnnnnnnnnnnnnnnnnnnnnnnnnnnnnnnnnnnnnnnnnnnnnnnnnnnnnnnnnnnnnnnnnnnnnnnnnnnnnnnnnnnnnnnnnnnnnnnnnnnnnnnnnnnnnnnnnnnnnnnnnnnnnnnnnnnnnnnnnnnnnnnnnnnnnnnnnnnnnnnnnnnnnnnnnnnnnnnnnnnnnnnnnnnnnnnnnnnnnnnnnnnnnnnnnnnnnnnnnnnnnnnnnnnnnnnnnnnnnnnnnnnnnnnnnnnnnnnnnnnnnnnnnnnnnnnnnnnnnnnnnnnnnnnnnnnnnnnnnnnnnnnnnnnnnnnnnnnnnnnnnnnnnnnnnnnnnnnnnnnnnnnnnnnnnnnnnnnnnnnnnnnnnnnnnnnnnnnnnnnnnnnnnnnnnnnnnnnnnnnnnnnnnnnnnnnnnnnnnnnnnnnnnnnnnnnnnnnnnnnnnnnnnnnnnnnnnnnnnnnnnnnnnnnnnnnnnnnnnnnnnnnnnnnnnnnnnnnnnnnnnnnnnnnnnnnnnnnnnnnnnnnnnnnnnnnnnnnnnnnnnnnnnnnnnnnnnnnnnnnnnnnnnnnnnnnnnnnnnnnnnnnnnnnnnnnnnnnnnnnnnnnnnnnnnnnnnnnnnnnnnnnnnnnnnnnnnnnnnnnnnnnnnnnnnnnnnnnnnnnnnnnnnnnnnnnnnnnnnnnnnnnnnnnnnnnnnnnnnnnnnnnnnnnnnnnnnnnnnnnnnnnnnnnnnnnnnnnnnnnnnnnnnnnnnnnnnnnnnnnnnnnnnnnnnnnnnnnnnnnnnnnnnnnnnnnnnnnnnnnnnnnnnnnnnnnnnnnnnnnnnnnnnnnnnnnnnnnnnnnnnnnnnnnnnnnnnnnnnnnnnnnnnnnnnnnnnnnnnnnnnnnnnnnnnnnnnnnnnnnnnnnnnnnnnnnnnnnnnnnnnnnnnnnnnnnnnnnnnnnnnnnnnnnnnnnnnnnnnnnnnnnnnnnnnnnnnnnnnnnnnnnnnnnnnnnnnnnnnnnnnnnnnnnnnnnnnnnnnnnnnnnnnnnnnnnnnnnnnnnnnnnnnnnnnnnnnnnnnnnnnnnnnnnnnnnnnnnnnnnnnnnnnnnnnnnnnnnnnnnnnnnnnnnnnnnnnnnnnnnnnnnnnnnnnnnnnnnnnnnnnnnnnnnnnnnnnnnnnnnnnnnnnnnnnnnnnnnnnnnnnnnnnnnnnnnnnnnnnnnnnnnnnnnnnnnnnnnnnnnnnnnnnnnnnnnnnnnnnnnnnnnnnnnnnnnnnnnnnnnnnnnnnnnnnnnnnnnnnnnnnnnnnnnnnnnnnnnnnnnnnnnnnnnnnnnnnnnnnnnnnnnnnnnnnnnnnnnnnnnnnnnnnnnnnnnnnnnnnnnnnnnnnnnnnnnnnnnnnnnnnnnnnnnnnnnnnnnnnnnnnnnnnnnnnnnnnnnnnnnnnnnnnnnnnnnnnnnnnnnnnnnnnnnnnnnnnnnnnnnnnnnnnnnnnnnnnnnnnnnnnnnnnnnnnnnnnnnnnnnnnnnnnnnnnnnnnnnnnnnnnnnnnnnnnnnnnnnnnnnnnnnnnnnnnnnnnnnnnnnnnnnnnnnnnnnnnnnnnnnnnnnnnnnnnnnnnnnnnnnnnnnnnnnnnnnnnnnnnnnnnnnnnnnnnnnnnnnnnnnnnnnnnnnnnnnnnnnnnnnnnnnnnnnnnnnnnnnnnnnnnnnnnnnnnnnnnnnnnnnnnnnnnnnnnnnnnnnnnnnnnnnnnnnnnnnnnnnnnnnnnnnnnnnnnnnnnnnnnnnnnnnnnnnnnnnnnnnnnnnnnnnnnnnnnnnnnnnnnnnnnnnnnnnnnnnnnnnnnnnnnnnnnnnnnnnnnnnnnnnnnnnnnnnnnnnnnnnnnnnnnnnnnnnnnnnnnnnnnnnnnnnnnnnnnnnnnnnnnnnnnnnnnnnnnnnnnnnnnnnnnnnnnnnnnnnnnnnnnnnnnnnnnnnnnnnnnnnnnnnnnnnnnnnnnnnnnnnnnnnnnnnnnnnnnnnnnnnnnnnnnnnnnnnnnnnnnnnnnnnnnnnnnnnnnnnnnnnnnnnnnnnnnnnnnnnnnnnnnnnnnnnnnnnnnnnnnnnnnnnnnnnnnnnnnnnnnnnnnnnnnnnnnnnnnnnnnnnnnnnnnnnnnnnnnnnnnnnnnnnnnnnnnnnnnnnnnnnnnnnnnnnnnnnnnnnnnnnnnnnnnnnnnnnnnnnnnnnnnnnnnnnnnnnnnnnnnnnnnnnnnnnnnnnnnnnnnnnnnnnnnnnnnnnnnnnnnnnnnnnnnnnnnnnnnnnnnnnnnnnnnnnnnnnnnnnnnnnnnnnnnnnnnnnnnnnnnnnnnnnnnnnnnnnnnnnnnnnnnnnnnnnnnnnnnnnnnnnnnnnnnnnnnnnnnnnnnnnnnnnnnnnnnnnnnnnnnnnnnnnnnnnnnnnnnnnnnnnnnnnnnnnnnnnnnnnnnnnnnnnnnnnnnnnnnnnnnnnnnnnnnnnnnnnnnnnnnnnnnnnnnnnnnnnnnnnnnnnnnnnnnnnnnnnnnnnnnnnnnnnnnnnnnnnnnnnnnnnnnnnnnnnnnnnnnnnnnnnnnnnnnnnnnnnnnnnnnnnnnnnnnnnnnnnnnnnnnnnnnnnnnnnnnnnnnnnnnnnnnnnnnnnnnnnnnnnnnnnnnnnnnnnnnnnnnnnnnnnnnnnnnnnnnnnnnnnnnnnnnnnnnnnnnnnnnnnnnnnnnnnnnnnnnnnnnnnnnnnnnnnnnnnnnnnnnnnnnnnnnnnnnnnnnnnnnnnnnnnnnnnnnnnnnnnnnnnnnnnnnnnnnnnnnnnnnnnnnnnnnnnnnnnnnnnnnnnnnnnnnnnnnnnnnnnnnnnnnnnnnnnnnnnnnnnnnnnnnnnnnnnnnnnnnnnnnnnnnnnnnnnnnnnnnnnnnnnnnnnnnnnnnnnnnnnnnnnnnnnnnnnnnnnnnnnnnnnnnnnnnnnnnnnnnnnnnnnnnnnnnnnnnnnnnnnnnnnnnnnnnnnnnnnnnnnnnnnnnnnnnnnnnnnnnnnnnnnnnnnnnnnnnnnnnnnnnnnnnnnnnnnnnnnnnnnnnnnnnnnnnnnnnnnnnnnnnnnnnnnnnnnnnnnnnnnnnnnnnnnnnnnnnnnnnnnnnnnnnnnnnnnnnnnnnnnnnnnnnnnnnnnnnnnnnnnnnnnnnnnnnnnnnnnnnnnnnnnnnnnnnnnnnnnnnnnnnnnnnnnnnnnnnnnnnnnnnnnnnnnnnnnnnnnnnnnnnnnnnnnnnnnnnnnnnnnnnnnnnnnnnnnnnnnnnnnnnnnnnnnnnnnnnnnnnnnnnnnnnnnnnnnnnnnnnnnnnnnnnnnnnnnnnnnnnnnnnnnnnnnnnnnnnnnnnnnnnnnnnnnnnnnnnnnnnnnnnnnnnnnnnnnnnnnnnnnnnnnnnnnnnnnnnnnnnnnnnnnnnnnnnnnnnnnnnnnnnnnnnnnnnnnnnnnnnnnnnnnnnnnnnnnnnnnnnnnnnnnnnnnnnnnnnnnnnnnnnnnnnnnnnnnnnnnnnnnnnnnnnnnnnnnnnnnnnnnnnnnnnnnnnnnnnnnnnnnnnnnnnnnnnnnnnnnnnnnnnnnnnnnnnnnnnnnnnnnnnnnnnnnnnnnnnnnnnnnnnnnnnnnnnnnnnnnnnnnnnnnnnnnnnnnnnnnnnnnnnnnnnnnnnnnnnnnnnnnnnnnnnnnnnnnnnnnnnnnnnnnnnnnnnnnnnnnnnnnnnnnnnnnnnnnnnnnnnnnnnnnnnnnnnnnnnnnnnnnnnnnnnnnnnnnnnnnnnnnnnnnnnnnnnnnnnnnnnnnnnnnnnnnnnnnnnnnnnnnnnnnnnnnnnnnnnnnnnnnnnnnnnnnnnnnnnnnnnnnnnnnnnnnnnnnnnnnnnnnnnnnnnnnnnnnnnnnnnnnnnnnnnnnnnnnnnnnnnnnnnnnnnnnnnnnnnnnnnnnnnnnnnnnnnnnnnnnnnnnnnnnnnnnnnnnnnnnnnnnnnnnnnnnnnnnnnnnnnnnnnnnnnnnnnnnnnnnnnnnnnnnnnnnnnnnnnnnnnnnnnnnnnnnnnnnnnnnnnnnnnnnnnnnnnnnnnnnnnnnnnnnnnnnnnnnnnnnnnnnnnnnnnnnnnnnnnnnnnnnnnnnnnnnnnnnnnnnnnnnnnnnnnnnnnnnnnnnnnnnnnnnnnnnnnnnnnnnnnnnnnnnnnnnnnnnnnnnnnnnnnnnnnnnnnnnnnnnnnnnnnnnnnnnnnnnnnnnnnnnnnnnnnnnnnnnnnnnnnnnnnnnnnnnnnnnnnnnnnnnnnnnnnnnnnnnnnnnnnnnnnnnnnnnnnnnnnnnnnnnnnnnnnnnnnnnnnnnnnnnnnnnnnnnnnnnnnnnnnnnnnnnnnnnnnnnnnnnnnnnnnnnnnnnnnnnnnnnnnnnnnnnnnnnnnnnnnnnnnnnnnnnnnnnnnnnnnnnnnnnnnnnnnnnnnnnnnnnnnnnnnnnnnnnnnnnnnnnnnnnnnnnnnnnnnnnnnnnnnnnnnnnnnnnnnnnnnnnnnnnnnnnnnnnnnnnnnnnnnnnnnnnnnnnnnnnnnnnnnnnnnnnnnnnnnnnnnnnnnnnnnnnnnnnnnnnnnnnnnnnnnnnnnnnnnnnnnnnnnnnnnnnnnnnnnnnnnnnnnnnnnnnnnnnnnnnnnnnnnnnnnnnnnnnnnnnnnnnnnnnnnnnnnnnnnnnnnnnnnnnnnnnnnnnnnnnnnnnnnnnnnnnnnnnnnnnnnnnnnnnnnnnnnnnnnnnnnnnnnnnnnnnnnnnnnnnnnnnnnnnnnnnnnnnnnnnnnnnnnnnnnnnnnnnnnnnnnnnnnnnnnnnnnnnnnnnnnnnnnnnnnnnnnnnnnnnnnnnnnnnnnnnnnnnnnnnnnnnnnnnnnnnnnnnnnnnnnnnnnnnnnnnnnnnnnnnnnnnnnnnnnnnnnnnnnnnnnnnnnnnnnnnnnnnnnnnnnnnnnnnnnnnnnnnnnnnnnnnnnnnnnnnnnnnnnnnnnnnnnnnnnnnnnnnnnnnnnnnnnnnnnnnnnnnnnnnnnnnnnnnnnnnnnnnnnnnnnnnnnnnnnnnnnnnnnnnnnnnnnnnnnnnnnnnnnnnnnnnnnnnnnnnnnnnnnnnnnnnnnnnnnnnnnnnnnnnnnnnnnnnnnnnnnnnnnnnnnnnnnnnnnnnnnnnnnnnnnnnnnnnnnnnnnnnnnnnnnnnnnnnnnnnnnnnnnnnnnnnnnnnnnnnnnnnnnnnnnnnnnnnnnnnnnnnnnnnnnnnnnnnnnnnnnnnnnnnnnnnnnnnnnnnnnnnnnnnnnnnnnnnnnnnnnnnnnnnnnnnnnnnnnnnnnnnnnnnnnnnnnnnnnnnnnnnnnnnnnnnnnnnnnnnnnnnnnnnnnnnnnnnnnnnnnnnnnnnnnnnnnnnnnnnnnnnnnnnnnnnnnnnnnnnnnnnnnnnnnnnnnnnnnnnnnnnnnnnnnnnnnnnnnnnnnnnnnnnnnnnnnnnnnnnnnnnnnnnnnnnnnnnnnnnnnnnnnnnnnnnnnnnnnnnnnnnnnnnnnnnnnnnnnnnnnnnnnnnnnnnnnnnnnnnnnnnnnnnnnnnnnnnnnnnnnnnnnnnnnnnnnnnnnnnnnnnnnnnnnnnnnnnnnnnnnnnnnnnnnnnnnnnnnnnnnnnnnnnnnnnnnnnnnnnnnnnnnnnnnnnnnnnnnnnnnnnnnnnnnnnnnnnnnnnnnnnnnnnnnnnnnnnnnnnnnnnnnnnnnnnnnnnnnnnnnnnnnnnnnnnnnnnnnnnnnnnnnnnnnnnnnnnnnnnnnnnnnnnnnnnnnnnnnnnnnnnnnnnnnnnnnnnnnnnnnnnnnnnnnnnnnnnnnnnnnnnnnnnnnnnnnnnnnnnnnnnnnnnnnnnnnnnnnnnnnnnnnnnnnnnnnnnnnnnnnnnnnnnnnnnnnnnnnnnnnnnnnnnnnnnnnnnnnnnnnnnnnnnnnnnnnnnnnnnnnnnnnnnnnnnnnnnnnnnnnnnnnnnnnnnnnnnnnnnnnnnnnnnnnnnnnnnnnnnnnnnnnnnnnnnnnnnnnnnnnnnnnnnnnnnnnnnnnnnnnnnnnnnnnnnnnnnnnnnnnnnnnnnnnnnnnnnnnnnnnnnnnnnnnnnnnnnnnnnnnnnnnnnnnnnnnnnnnnnnnnnnnnnnnnnnnnnnnnnnnnnnnnnnnnnnnnnnnnnnnnnnnnnnnnnnnnnnnnnnnnnnnnnnnnnnnnnnnnnnnnnnnnnnnnnnnnnnnnnnnnnnnnnnnnnnnnnnnnnnnnnnnnnnnnnnnnnnnnnnnnnnnnnnnnnnnnnnnnnnnnnnnnnnnnnnnnnnnnnnnnnnnnnnnnnnnnnnnnnnnnnnnnnnnnnnnnnnnnnnnnnnnnnnnnnnnnnnnnnnnnnnnnnnnnnnnnnnnnnnnnnnnnnnnnnnnnnnnnnnnnnnnnnnnnnnnnnnnnnnnnnnnnnnnnnnnnnnnnnnnnnnnnnnnnnnnnnnnnnnnnnnnnnnnnnnnnnnnnnnnnnnnnnnnnnnnnnnnnnnnnnnnnnnnnnnnnnnnnnnnnnnnnnnnnnnnnnnnnnnnnnnnnnnnnnnnnnnnnnnnnnnnnnnnnnnnnnnnnnnnnnnnnnnnnnnnnnnnnnnnnnnnnnnnnnnnnnnnnnnnnnnnnnnnnnnnnnnnnnnnnnnnnnnnnnnnnnnnnnnnnnnnnnnnnnnnnnnnnnnnnnnnnnnnnnnnnnnnnnnnnnnnnnnnnnnnnnnnnnnnnnnnnnnnnnnnnnnnnnnnnnnnnnnnnnnnnnnnnnnnnnnnnnnnnnnnnnnnnnnnnnnnnnnnnnnnnnnnnnnnnnnnnnnnnnnnnnnnnnnnnnnnnnnnnnnnnnnnnnnnnnnnnnnnnnnnnnnnnnnnnnnnnnnnnnnnnnnnnnnnnnnnnnnnnnnnnnnnnnnnnnnnnnnnnnnnnnnnnnnnnnnnnnnnnnnnnnnnnnnnnnnnnnnnnnnnnnnnnnnnnnnnnnnnnnnnnnnnnnnnnnnnnnnnnnnnnnnnnnnnnnnnnnnnnnnnnnnnnnnnnnnnnnnnnnnnnnnnnnnnnnnnnnnnnnnnnnnnnnnnnnnnnnnnnnnnnnnnnnnnnnnnnnnnnnnnnnnnnnnnnnnnnnnnnnnnnnnnnnnnnnnnnnnnnnnnnnnnnnnnnnnnnnnnnnnnnnnnnnnnnnnnnnnnnnnnnnnnnnnnnnnnnnnnnnnnnnnnnnnnnnnnnnnnnnnnnnnnnnnnnnnnnnnnnnnnnnnnnnnnnnnnnnnnnnnnnnnnnnnnnnnnnnnnnnnnnnnnnnnnnnnnnnnnnnnnnnnnnnnnnnnnnnnnnnnnnnnnnnnnnnnnnnnnnnnnnnnnnnnnnnnnnnnnnnnnnnnnnnnnnnnnnnnnnnnnnnnnnnnnnnnnnnnnnnnnnnnnnnnnnnnnnnnnnnnnnnnnnnnnnnnnnnnnnnnnnnnnnnnnnnnnnnnnnnnnnnnnnnnnnnnnnnnnnnnnnnnnnnnnnnnnnnnnnnnnnnnnnnnnnnnnnnnnnnnnnnnnnnnnnnnnnnnnnnnnnnnnnnnnnnnnnnnnnnnnnnnnnnnnnnnnnnnnnnnnnnnnnnnnnnnnnnnnnnnnnnnnnnnnnnnnnnnnnnnnnnnnnnnnnnnnnnnnnnnnnnnnnnnnnnnnnnnnnnnnnnnnnnnnnnnnnnnnnnnnnnnnnnnnnnnnnnnnnnnnnnnnnnnnnnnnnnnnnnnnnnnnnnnnnnnnnnnnnnnnnnnnnnnnnnnnnnnnnnnnnnnnnnnnnnnnnnnnnnnnnnnnnnnnnnnnnnnnnnnnnnnnnnnnnnnnntgtgatattttttttagtctctatagtttaagacattcattttggttcttatatttacaattttttttatcttttggtcctcgaggggaagattcaactcacacataaacatgaacaaaattaataaaaatagggaagcaagctcaggtacaaatgaagtgtaatggaggtatgagacaaagccactacacattccattattcttgagtctgccaccgacctctgcaagcttagcatttgccaattgccatgatgtaatctcgttcttgacagtctctcatcaagttggagtggtatcacagcattgaactaagttgatcgttccaatgggatgatggttttgattgctgcagataaagtgtgtgattgtgagtttctggtcccatgagttaaactataaggattaaaaaaaatattgtcataactttaagggccaaaaggataattaaaccttttattttttttaacaacgggttatatatatgtagcagtttattctaaacaatggactacgtgtgaaatctttgaattctatgtaagaaatgttatttcaaacttctcatcagtcttcatgtcaatgatgacatgctccatttgaattctatgtctaattaagctctcggtcttcgtttttgcaactttatttcgtagaaagaagccaaatttgaagatacaacatttgatactataactgtttggtgttttgaaaatctcactcacatatttccaaatgttacaaaagaatttgattcagtggttattacgaattccttcctagccttttttaccaagtcagggaatttgcattgttgtgcatgatggctgccacaaggacccttgtaccaacccattagtgcaagtggttttttcttatgagaattgagaaacaaattatatgtgttttattaagggaattctattatttttaattttgaacttgtaatgttttttgtttccctcacagaacaagtgatgaaactcttgatgatcgacgccatacgtacgcctactttgatgctcttttttcacaccacttttatcttaatggtatctcaagttgacaatcataaattaaaatagctaactatagttgattagtagagacaaacagctcaaagataaagatctttaagccatcatttttttttccttttcttttctatgagctgtcatttcttatctctacatggaatgtctagaagttgaaaattacttgagctttctttacctactgctttccattttggcgaactgcttttctttctcataatgaactttccacttccaatgatggttgaacattaataattcttcatctattttgtctaaaaatttccactcactttttttagtggtgttaatgtcatgcagacaaatgatgtccaagctccactttttccattcattgcaagttgcaagcagaatgtagaatgtacgtataataaaataatgagaatggcaactgctataagtactacttaattagaacaaaagtatcaaaattaaaacgaaaataactttgatgctgttaatatatgagtttaattttgatagatagtgtaaaaatttaaattgtttattaattagaaatcaccaaatgatttgtaaaacaattagtaaaaaagttataagaaatatatatataattaattaattgcaaatgaaagtgtatttaaattaaattcttaattaacatatccttattgtgatattttgtatattttttatttaattgagacagtggaatgagaccgcactataattttcatcacgggttgtattgtctaatataatagggatggttggtgaggaattttggaatgttagttggttttagactatatatcctcttgttcagttttcacattctcattagagttaagttgcttttggggaagaaccaatgtcttgaaattccctcttcaccagaagcagttttattgtgtctttatcgaagtcatcttctccagagacttgcctttaactttgaagataggaaatagatccaacattgtttcagttattggattctggatcttattttaaggacatgtgattttccaagacttcttacaactcacaacctttggaatttctctatgcctggttaacccacaatttctggcgccggtgcggttaggaacataggcnnnnnnnnnnnnnnnnnnnnnnnnnnnnnnnnnnnnnnnnnnnnnnnnnnnnnnnnnnnnnnnnnnnnnnnnnnnnnnnnnnnnnnnnnnnnnnnnnnnnnnnnnnnnnnnnnnnnnnnnnnnnnnnnnnnnnnnnnnnnnnnnnnnnnnnnnnnnnnnnnnnnnnnnnnnnnnnnnnnnnnnnnnnnnnnnnnnnnnnnnnnnnnnnnnnnnnnnnnnnnnnnnnnnnnnnnnnnnnnnnnnnnnnnnnnnnnnnnnnnnnnnnnnnnnnnnnnnnnnnnnnnnnnnnnnnnnnnnnnnnnnnnnnnnnnnnnnnnnnnnnnnnnnnnnnnnnnnnnnnnnnnnnnnnnnnnnnnnnnnnnnnnnnnnnnnnnnnnnnnnnnnnnnnnnnnnnnnnnnnnnnnnnnnnnnnnnnnnnnnnnnnnnnnnnnnnnnnnnnnnnnnnnnnnnnnnnnnnnnnnnnnnnnnnnnnnnnnnnnnnnnnnnnnnnnnnnnnnnnnnnnnnnnnnnnnnnnnnnnnnnnnnnnnnnnnnnnnnnnnnnnnnnnnnnnnnnnnnnnnnnnnnnnnnnnnnnnnnnnnnnnnnnnnnnnnnnnnnnnnnnnnnnnnnnnnnnnnnnnnnnnnnnnnnnnnnnnnngaaaaagacgaccttcaaagaacgtataataaaataatgagaatggcaactgctataagtactacttaattagaacaaaagtatcaaaattaaaacgaaaataactttgatgctgttaatatatgagtttaattttgatagatagtgtaaaaatttaaattgtttattaattagaaatcaccaaatgatttgtaaaacaattagtaaaaaagttataagaaatatatatataattaattaattgcaaatgaaagtgtatttaaattaaattcttaattaacatatccttattgtgatattttgtatattttttatttaattgagacagtggaatgagaccgcactataattttcatcacgggttgtattgtctaatataatagggatggttggtgaggaattttggaatgttagttggttttagactatatatcctcttgttcagttttcacattctcattagagttaagttgcttttggggaagaaccaatgtcttgaaattccctcttcaccagaagcagttttattgtgtctttatcgaagtcatcttctccagagacttgcctttaactttgaagataggaaatagatcagtcaaacattgtttcagtttatttggattttattttaaggacatgtgatttacaaagacttcttacaactcacaacctttggaatttctctatgcctggttaacccacaatttctggcgcctgttgcggttaggaacataggctagcaaaaacactaatcatttcaagagaaatgttaacacacttttctaatatattattttttatattaaaatttattaaaataaaaaattcagctgatctcatattttatttagcaaatttttcccatatattaagtcttaggtttttaaaattataaagctaaaactaaaatgttttactaaatgtattttaaagtaaattttacacacaaaaatattatgattttataaaaattgtttggtcaagggagacatattgagccctcctaactataagctaccctgagggtttctatctttttttttcccacttaatttttgactttggcagcaagggttaaacctaccacatctacatgactatgtcttactttccaataagttacacctaaatagctaacatattcctcttgctcacgcacactatctttcgtaaacttttcacgatcatctttatattatcaaattcatttaattaatatacaattatcttaatattataagcaagtctctgtataatcatgtagtgtttctaaattgaatgagcctaaatcacacacctgaaaaaaaaagagtcatattgtcaaaatagccgtaaaaagatagaaatactaagttatgggcaagattttgatatactataaccttaatttttacaataaacctaaatgtctaaatatcataactcaaccatgcgacgaaatgacaatgtgttaattttgttgtgtcctcaaccatgcgtatgcctcaggccgagggaattctcacacaccactcctaacaatttctaaggaattccacaacgtgtctatgcttcagacaacaataacgtaccaaataaacaagtagcatctaataatgttaaaataagcacacatatatcgagccaaccaacgttggaggtagaagaacaacaataatatcaatatttaattttatttagtgttaatttattaggaactcaacgtaaaataacaatttattaggaaataaatacaaaatttgagtatttattaagaataaaaacatatttaatttcatttagtgtttaatagtgttttggtctattttttgtttttttgtttttttatagttatttcttttcaaatttgatgacaacattgtcattgggtccttctacccttcacatcagcaaattggacactaaagagactcggtcagaaacaaataactactaggggtacaataacatgagaggatttaacacttttggagtaggaaaatgtactttaagaaaagaaaattatatgtttatccatgaacactaagctctagagaaaaaaaaaaccacgagaaatagtatataactctttagtggacaattggtgttgtacaaaattgaaatgatccagactaagtcaacaaactggtcttcttcattgaactcacagtgaaaccacagaatttattttcatctgctagtttccttcccaattcccatgttttctaaaacataacacactacagaaccttctaataaattaaaacaaaaaaatcaatattttacatgtagcaccacaacctaacaatttctacctacaactttttctatagactataatataatctatctccactcaatcattcatcaagattgaaaaatggattcaaatgcttgtctaccacacttgctagtgttagcaataacattggtattggttagtcatgcaatgggagattcagctaaagacaagtgttgtctctttgccttttaagttgtacatagttgcaaaacaggtatatgtgaaagaataatgcttattaaaggtaaggttgattttaaagtgggcatgcaagaatgcattcattatctcaagtaaataaattcaagcgaatatctgatttggattagagaatagtattatccagtgcacactaaattggagagattcccaacatgtggtttcaaaactaaaagtacttaccaactatttgaattttaatctacgtgatctagctaatgttttctatcagagaattacaactagttgatcttaagaacaaaactatactaaatatgcaaatctttacatctaaaaacagaatttaaataaggctctcaaatttgaagaaaaaaaagaagatagcaatgactacaaattgatcaatctgccaatacaatgataaaacatcggtttattctaagcaacactaaaaagggatactacattagcaaaaagattgaaattattgaccatgcagtatgaatgtacagcattatttatttaatttttctaatacgattttattttatattaatacaaaaactctcacaaaacaacttcttaactactagttaattactacttttatacataaaaaaactagttaattactactgctacatagcagaaattccttaattcttcgagaattatattccttaatttcacgtggtttgcctcagttgtttgccgcaggtttcagtatatccttaggaatcgtcgattgtcaaatcgttgttaaataacggcgctatatataattttagtattttgacgtttttaaatgaatttcttatttatgattatatatttacaatttttaatttcacttaaaaaaaagagtttttttggatttacagagaaaaaaaatagagtttttagttaacacactgttactatatagtgcggagacaattaccccacaagcttttcattaacttgtcataatataatatatgtgaatacaaactgtccctataatttaaaataaaataaatgaaaagtcaataactttataagtattgtctccacacatatatattatcctataacttacaattttaatatttattattgatattcttaattaactaagtaaaaatattttttttataatttttaagataattattataaatattaataaatttattataaataacatttttatatgtgtaagtgcatgtatattatttattgaaatattttatttgaatttttcattaaaaatactaaatttattaacatgatatgtgcctcgttagagcagtggtttaattaaattggatagtgagaactgaattgacgacagattctctttccatatgtgatgaaagagttgtacgaaatctttatgacatcaacccccaacatgagtggcccagtggacaagcccatcaatctaacatgtcggttgatagcacttgcataaacttttgttccttgcatcatctcatgtgtctccattctccattctctgcttccactcacgattaaaccttattgattagggttcaatgatttttcaatgaataaaattaattttgaattcttgattctaacagctcacgtatagtctgttgaatcaaatggattagactcttgatatcataaagaaaattaaaatttgattctttgtgtaaaataaagaaatctaattaattatgcttgttatgttactatatcatttttccggtgtggaataacatcaaaatcaaagtaataaagttacttgcatgttactctaaccataattccagttaagtcgaatatggtttcatgttttgtaaaacaatttagatcctctttatcaaagtgtgtctgtcttttacacaagttttttcactttattctatttccccagaatcaattgttgtgttattcatgttattaaattagttcgataactaccatgtcgatcattgttagttttgtttccaccattgttgggagtacgtatatactattactttatgattaaacgtgttacttaaattgcagaaaaaaactctttataatgaagtacaattgtttataactacaacaattatattgagtcaatttaacactcatcaaaggcagaaaagctttactttaagattagacagaggctcataccaatcatggcggtggttataattagacacatcagcaactgtaaaagatcttgcacggccacagaaaaaaaaaatgcttgatgcacatctgataaactcactcaaggtctatgtattaatagtgtaaaagagagactgaatattaaatgataaaaatataaaataattgttttgtattggcagagtacacatatatatgcccaaatgtagattcaaagttcaaacattttgggactagatcatccctcctagtcatagccatctgaattggatcgaccccaccccaaggtttgtgttgcatcacttgcatgcattcacccaccactgttgttgttatagttttctcgtgatttttgtattggaaaatactatggacaaatataattgatacagtcataattaattattgtcatgttgcaattacaaagactcctcaaagaaaatgtttagtaaatcatgatcaagtagaaattgcaatggcaaactgttttttaaaatcttattagtcagttgtataaacccaaatttagttatatccaggtatgtaatatttgccattttagtgctctgtttggaaatttgcgtgtcgaattgttttttttatacgtacctacacaacactctttagccaaataccactgttcatggaaaaatctgtcctgaaaggagtatagaaccagaaacaatatgcgtggtggtatctatcattctgaaaaagaaaaaaagtgggattcttacaatagtaggactgtgacactactagaaaaatctatgcacctttgatgtccctaaatttatgaacaaaagattcaggtgtcgtttattgaatttgttttatatggagtgtaaagtcatattcaatactaataagtgtatgtttatataattctttttaaaataattactcttctttatttacatctaataaaaatgttatcacattaaaatttttaaaataagctaaatgaagcatgtttcataagaaattaacttttactgtaattgatacattttttagtgacaaagggagatgggtgaagacggtgaaggaaaaaaaaatgaagataatgtctatgttgttcaaataacagtattaattgtattaaaatagttaatattaaaaaatatattagtaaatataacattgttgtgttggtgctatttattgtgcatcaaaatatgtaaaaataataattaacttataatttgtatagttggtatgggttgttttatctatcctggattttgttgaatcacacatataatcatttatatatatatatgggctactattgtcactaccaaaaatgctatggagactaccaaagcatttgaaattacttggttatccttagttccaattccccacacctcctatccttcccctccttacgttcagctactctccttctttacatacaaaaacagaatttaaataaggctctcaaatttgaaaaaaaaaagaagatagcaatgactacaaattgatcaagctgccaatacaatgataaaacttcggagtattctaagcaacactaaacagtgatactacctaagcgaaaagattgaagtttgaaccacacatgatcaaggaaatgaaaataggcataccgccatgatctacaaatcagcaaaggagcaatcactatccagaatcccacaataaatccaattgtcatactgacaaaaaaccaattcactccatgcccatcacttccttcataactatgggttttcccattggagctgcagtttatgggcagtggtggaccacatagattgttgccgatgaagctggaggcatcaaaggtttgcaattgagttcctgttggaatatttcccttcaaatgattgtatgacaagtctagcatgctcagaaagctcaaatttgcaatgcttggagggatttcaccaaaaagttgattcctcgaaaaatcaatggactgtaatgatctcatattacctataccttgtggaatatgaccaatcaattggttgtgggacatgtttaaaaaattcaatccatttagatatgtgatttctcttggtatttccccaaataacttgttacttgacagatcaatgcttgttaccaaacccagaatgtttctgtactcatctcctcttcctttcagccatagtagcacactaactatactttccatcgacgtaccatgttttccttgagaatagatacgaggatctgtactttggttcattagtgtcatggcactcaagttactgaaacagctcggtatattgccagacagattgttttgtgcaaggtctaaaacctgaagatgactcatctgacatatttcacttggaatgtgtccggcaaatctgtttgatcgaaggcggaggattttcacatttaagaggttttctccaacccatgttagaatacttccggaaagattattttccccaaggtccaaggatatcaattcgttattcttcttccaactggttggaaatattcctgagagtgtgttgttacgaatttgtaaagactgcagctctgccaaggaacccatggattggggtaagttcccaacaaaatggttgctttgtaaatttacatccacaagagatgtccaattcatccagcaatcaggtatctctcctgacaaattatttgatgcaagattcagaaattctaattgcattggctcgtcctgatcgttacataaaaagtcattcatggattcagagaatgaattgcttgaaagatctaactgaagcacatcacttgaaagatagggtaatttaccacacaagtgatttgagcttagatcaataacggggatagatattggattctttaatgtagtcccaatctcaccatggatatgattacgagagaggtttaaatacctaacctgagaaagtgcttcccacatctgtgtgggaatagaaccgaaaatccccgtgttagatagtccaacatattgaagttggttttgtgactgaatccacaatggaaagctgggacctaactgccatgatgtcacttccaaataggtaagttgaaaattaggaatccaattgggacccactgttaaagtgaaattgtttcctgatgcatgaatctccgtcaagcttgtaagatttgcaagatcatcttccttgacaactccgtgaaaaagattgccgtcaatatgaagagataacaatttagagagtgatcgaagactttcaaatggatttccaatgaatttattcatagagagatcgagatatcttaatgatgaaagttttccaaatgatctaggaagagcaccaccaattgagttgttggaaaaaagtaacgtgtcaatatttttaaatgccccaatatgatctgtcagattgcctgaaagtcgtgaactctgaactgcaagtgttgtgagtccatgggaaatacaaggagcaagaatttctaaaagttcattaacctgttggttgagtttgagatatgataaatctatcacccttaagttgcagagattacccaaagaagttggaatgtttccttcaagttgattacctgataaatcaagttcaacaagagaagtcaaatttcccaaagaagttggaatgtttccttcaagttgattacctgataaatcaagttcaacaagagaagtcaaatttcccaaagaagttggaatgtttccttcaagttgattacctgataaatcaagttcaacaagagaagtcaaatttcccaaagaagttggaatgtttccttcaagttgattacctgataaatcaagttcaacaagagaagtcaaatttcccaaagaagttggaatgtttccttcaagttgatttcgtgataaatcaagttcaacaagagaagtcaaatttcccagggcatcagaaatagtcccatgcaagttggtttcccctaggttgaggaacttgagacgatgaagaccgtataagcaattaggtatagaagatgaaaatgaattgaaagacaagtcaagattttgaagatgtgtgaggtttcgaataccacaaggaatcggaccttggatttgaaaattatatgataattgaagagaaacaagtttcttcaatttgaatatccacttggggacaaaagaaatggcaggggaataactagttaaggaaagatggagagtttgcagagatgagaagttgagcaaggatggttcattatagtgagggagtaaggatcgtgacaaatataggtgggtcaaagaaggaagagattggagagtgtgtagccaatgaaatgctttggataggtttgcactactcaaatcaagatattcaagcttccacatacttgatacccattctacattttcagcaaacagaaatccgagatcagtcaaataacctccgaggtcaaggtagaccaaattggagagattcccaatctgaggaggaatcttccccgtgaatccagtataagagaggttgaggtgagtcaaggaagtcattgtcccaaggaaagaaggaattgacataccttctccaaggaattcattgccgctcaagtccaagtaattcaaatgctttaaatcagccaaacaaggacttatcactccaccaaactgggatttctcataagcttcctcatcgaagtctgagtagagatagccatcatggtcatgatagaaagcagaatctgaagtgttgaggtgaagctgaagaacatgggaagtgacgttgtggcagaggactccataccagtggcaacagttggtattattatgattccaagaccaaagcctatttgaaggatctatgagattattcttaatcttcaaaagtgtctcacgctcacttgggatgcacacactctctctgcatggtaagctgaacaaccaaagctggacaaagacaagaatataaatggaggaattcatgatcacacaagaatatatagaaaacaagtgttgttgttggttctgcatataaatcatcaaacttctattatttatactgctgccctgcctgtttttttcttcactttcattattttttaccttttttattattgtgccaaatactaaaatattcttccattctttttttacgctggcctctttaaattatcgatttaattatccaattctcccgaattaattcttagaatacgaaaatttttgtatttactgtatcaatctccctttttaaaattcctatatacactaaattcataaaaaaatcaaaattaataacaaagaaatatgatttacttgtgctgaatactaacataagaaacattttttttggtacagtttttttttttttacaaaaataagtaagaatcattgtattttaatttaccctataatactgcttaaatgaaaatttggtgtcattaaaattcaaattttaactattatttaatcaatcttttcgttaaacttttgttacgtacaaaagtccaatatttttttaagaaaaaatcaagtcttctatttcatcaaatcccaacccatgattaatattaaattatcaaattttcaacattcaaactaaaaataatgtaaaagaaaattgtcttctaaatcaaagctcacacaatcaagtcaatctcaagcttttccattttttcatcttgaacctttggacactctacaaagtccagccatgatgttaaggtctgacttcttcaacttgaataccttcatatcaaacaaatgttgcgagttaagtcaagcaaggaaaaaaaaatataattgatgaataaatcaattataggaaaagactttactttaaagactattttggttaaaaaaatctataaaaaaaattatttcgttccaagctagctatttaattttgatcaatttttcaattcacaaaataatattctttttatatgtgaaaaagactaattaatcttcattgtcattaatgattgttgtgttgtctatttctaattttttttaatcataatattattttctttttttattaaaaattaattagtgagatacaaagaagtttaaattgcttgtttagcttggtctatcataattattgagatcatagtttttccttttataagtcttgttccaaatttctccatgtattgtgtagatcatatttaacttaaaaagtaaattagaannnnnnnnnnnnnnnnnnnnnnnnnnnnnnnnnnnnnnnnnnnnnnnnnnnnnnnnnnnnnnnnnnnnnnnnnnnnnnnnnnnnnnnnnnnnnnnnnnnnnnnnnnnnnnnnnnnnnnnnnnnnnnnnnnnnnnnnnnnnnnnnnnnnnnnnnnnnnnnnnnnnnnnnnnnnnnnnnnnnnnnnnnnnnnnnnnnnnnnnnnnnnnnnnnnnnnnnnnnnnnnnnnnnnnnnnnnnnnnnnnnnnnnnnnnnnnnnnnnnnnnnnnnnnnnnnnnnnnnnnnnnnnnnnnnnnnnnnnnnnnnnnnnnnnnnnnnnnnnnnnnnnnnnnnnnnnnnnnnnnnnnnnnnnnnnnnnnnnnnnnnnnnnnnnnnnnnnnnnnnntttctaattgtattcgaacttgaatattattttatttatcatataaaaattaattatttatataaaagacataaaaagaatattacttttttttctcaaaaaaaaatcagtatcatattttatgttttttacaagttatcaacttaaataagaggagaaacataattttaattttcattttactttttaaataattgcaagtgccaaatttaaataatcatgagaatactcatgtttaatataatattctaaaaaaaatccatacgataacttaaacaatctacaaagaaatataatttattcttgtgccaaatgctaaaacaagaaacatttttttattttagtttaccgtatagaattgcttaaatcaatgaaatttttattttaagaaaatattaatgatttttacatcaaaggtaattaaatttggcttaattagtcttcaaattttaactattattcaaatcaatcctttcgttaaacctgtacatgttaagtaaacaacaaaaaatcttgccttataaaattcaaacattttattacatgtggtttgaacccataattaattttaaactatcaaattttaattattcaaaataaaagaaatgaaaacaaaattgactcctagacaaaccgctggccacctgattgttgccatttatttcttttactcttttttttggttcttttattttgtccaactttaactttaactttaattagtgaggctcacgcggatttgtgctttttaaactttcttttcattttaccttactttctgtgtaacaaccaagaggaaacattcaacacgcaaagattagccaagggttgcttcggattcaaattatttnnnnnnnnnnnnnnnnnnnnnnnnnnnnnnnnnnnnnnnnnnnnnnnnnnnnnnnnnnnnnnnnnnnnnnnnnnnnnnnnnnnnnnnnnnnnnnnnnnnnnnnnnnnnnnnnnnnnnnnnnnnnnnnnnnnnnnnnnnnnnnnnnnnnnnnnnnnnnnnnnnnnnnnnnnnnnnnnnnnnnnnnnnnnnnnnnnnnnnnnnnnnnnnnnnnnnnnnnnnnnnnnnnnnnnnnnnnnnnnnnnnnnnnnnnnnnnnnnnnnnnnnnnnnnnnnnnnnnnnnnnnnnnnnnnnnnnnnnnnnnnnnnnnnnnnnnnnnnnnnnnnnnnnnnnnnnnnnnnnnnnnnnnnnnnnnnnnnnnnnnnnnnnnnnnnnnnnnnnnnnnnnnnnnnnnnnnnnnnnnnnnnnnnnnnnnnnnnnnnnnnnnnnnnnnnnnnnnnnnnnnnnnnnnnnnnnnnnnnnnnnnnnnnnnnnnnnnnnnnnnnnngagacagattaaagataattcgaataaagacagtaatggccgatggcgtgccgttttgtgcattatatgatgtggtccacaatttgaaacatatataaattatattatatatgtctaatttatattatggaaaatcataataaaggtctaattatattattgaaaaatactatttttacatttcacaagataaatgtcttatttattatgtctaatataaattatactagatgaatgtctaatttatattattgaagttcaatgaataaatatttttgcatatataaaattatatcttggattttataacaaacaatttaaattgtgaaaataaattacccttcaccagcagcaaggtcgaagcagcttttgtagcactgagggaagcaaaggttttgtgtgaaaccactttccataagagaattgatgagattccaaaggattttctgtccaaccaacaagccttgatgcatttctcactttcagtatgccccttaatttgtttttcagccgaagtcctgcacgtgtaagcttcttcccctgttctcttcacatgctaagaacatatttttaaagggaaattcttgttgttaagaatttgtacgtgtatgcaacacttttgaactccgtcaaagatttttttttaaattaacatttccaccaataatatgcaaacacgtttgtcttgggttggtgcaaaaaattctcgtgctctatagaaatttgaaatatggatctacgtttaacttccttgaatgaaagaaatacgtaaagggtacgatgtaaaatttacccacggacttaacttaaatgtggtagtaattaattattttttagagaaaaatgattatgtaaaaaaatttacacaattatttaagtaaaatttattatatataatacattttttattaattattttaaaataattcagatgataatttatgattaaatgattatataaaattattttatatggttagtatattgacattaaactttnnnnnnnnnnnnnnnnnnnnnnnnnnnnnnnnnnnnnnnnnnnnnnnnnnnnnnnnnnnnnnnnnnnnnnnnnnnnnnnnnnnnnnnnnnnnnnnnnnnnnnnnnnnnnnnnnnnnnnnnnnnnnnnnnnnnnnnnnnnnnnnnnnnnnnnnnnnnnnnnnnnnnnnnnnnnnnnnnnnnnnnnnnnnnnnnnnnnnnnnnnnnnnnnnnnnnnnnnnnnnnnnnnnnnnnnnnnnnnnnnnnnnnnnnnnnnnnnnnnnnnnnnnnnnnnnnnnnnnnnnnnnnnnnnnnnnnnnnnnnnnnnnnnnnnnnnnnnnnnnnnnnnnnnnnnnnnnnnnnnnnnnnnnnnnnnnnnnnnnnnnnnnnnnnnnnnnnnnnnnnnnnnnnnnnnnnnnnnnnnnnnnnnnnnnnnnnnnnnnnnnnnnnnnnnnnnnnnnnnnnnnnnnnnnnnnnnnnnnnnnnnnnnnnnnnnnnnnnnnnnnnnnnnnnnnnnnnnnnnnnnnnnnnnnnnnnnnnnnnnnnnnnnnnnnnnnnnnnnnnnnnnnnnnnnnnnnnnnnnnnnnnnnnnnnnnnnnnnnnnnnnnnnnnnnnnnnnnnnnnnnnnnnnnnnnnnnnnnnnnnnnnnnnnnnnnnnnnnnnnnnnnnnnnnnnnnnnnnnnnnnnnnnnnnnnnnnnnnnnnnnnnnnnnnnnnnnnnnnnnnnnnnnnnnnnnnnnnnnnnnnnnnnnnnnnnnnnnnnnnnnnnnnnnnnnnnnnnnnnnnnnnnnnnnnnnnnnnnnnnnnnnnnnnnnnnnnnnnnnnnnnnnnnnnnnnnnnnnnnnnnnnnnnnnnnnnnnnnnnnnnnnnnnnnnnnnnnnnnnnnnnnnnnnnnnnnnnnnnnnnnnnnnnnnnnnnnnnnnnnnnnnnnnnnnnnnnnnnnnnnnnnnnnnnnnnnnnnnnnnnnnnnnnnnnnnnnnnnnnnnnnnnnnnnnnnnnnnnnnnnnnnnnnnnnnnnnnnnnnngacagatgatttctagacaagttcaaaaaccgcaaagcagatagcttggaaatttcagatggaattgctccagacagcttattacttgaaagatcaatcattctcaccaatatcagattgtctctgtactctaactcatctcctttgggaactaagacaagagtttccttgtagtggttataactgaagtcagagccatatgaataatattatcacataaatcagatctctcaagtggtcaagataatgaaaataagcacgcctccaagttctgttgaagaaaacaacactgcaaaaaccccaaaatcctgctgcaaatccaactcccatacccatataaaactctgatgttccaaagaaattaccatcaccgtgtcgaacagaagcactctctgtcaactcttccttgtctgtgcaattttttgttacaggaggaccacaaagcccatgtcaatgaatttcattgtagagcaattttgcagtgttgaaggaatatatccagagaagcggttgtcgtctaacaacaaagactcaagttgagatagataccccatggagtttggaataacaccagacaaattgttactacccaagttcaaatgcaccaatgcttgccaatgcacccaacagtgaccaagatcaccagataagacattatttgaaaaatcaagcacactcaaattattagtagcattttcctttccacataaaaagggagaaattgttccggaaattgagttattggcaacattcagcacttcaacatttgcagacacacttggcaatgtacccttgaacaaattagaactcaaatttatgaggctggaattgagaaagatgttagataggtctccacttaacagattgttggacagatccaggaattcagtttgcaaagtccaattccaaaaccaacttggaaccaagtctgcaatacctgccttagacattgtcaaaaccttcacagaactttgcctttttagccattctggaaacttaggacctattccaaaggagctcagtaaaacatattcaagctgaaaaggaggaacccatccagagttgacactgaggaacaagtttgtccaagacaaacgtagttcctttaatttcaaaagttttacaaaatttgactcttttatagatccttctaacaaattagatgaaaggtctaacatcactaaatttgagagagttccaagagttacaggcatatcaccagtcaaagaattagttccaagatttaatacctgcaggtttctgaggagctcaaaactcttaggaatggttccattcagtcggttgtgagccaggtttaaagttctcaagaatgacaagtttgcaaatggtgagggaattggacaagtaaaggtattattactgagatttagaacttcaagatgcttaagcttgcctaatgaatctggaagtggcccactgatacgtgatgcagggggaattctggtttcgaggaccagggcctccaaaagggtaaggaaaggaaataactaagaaaagataattctcatattcatccctctttctgtgaatcattacatttatttatactgattcttataacagaattgctattctatggaattttcaggattcaagtttgttacaattatctcccacgtgttgtaattgctctaacagaatgcatatatgcctttaataccatcccgcccctttcagatgtaatctttgaggtacgttggtctctctacccttctcttgggcctttgctctttgttttctgaaattgcttgttgcaccttatcctgctggttgttaatctgcattgcttgttgcacctcattctgttgattgtctccctctgctatgtttccccctgtatcacccctgggcccttgggaaagcaccttgtcctcaaggtgataatcccggcataaggttgaccaatcctcccaggaagtctcatcaggggagagcccatgccattgaacgaggacgtcccacccagaaacagatgatggtcgagaagcaaggatcgcagcaggttggacgagggggtgatcgtcatgaaaagaaatcggcagtggattagcaacagggtcgttaggatcacccttgaatggttttaacatggagacatggaagatgggatgtatcttagcatcaggtggtaactgtaatcggtaggcaaccttgccaatggcctcgagaacctgaaatggcccatagtaacgttttgccagctttcccgagatggtggggttttcccgggcagacgtttgacggtgagggcgcaggcgaagtaagacccattgtcccggcgagaagactatatcacgtcggtgtttgtcagctttctccttcattagaatctgggcctttagtaatttcttacgaatcataaggaaggtttcctcccggtcacaaagcagggtatctatagcatcaatgttagagtcaccggcaaggtactccgggaagttaaatggcttccggccaaaggtgacctcatatggagtggccccggtcgcggagttccaggaagtgttgtgcgaccactccgcccatggaaggagacggccccaaatacgagggcgccgatgaacgaacgagcgtaagtattgctcgataatacgattaatagcctcagtctgtccatcactctgggggtgatacgcagaactcatacgcaagtgagtgccactgcgccggaaaagctcctgccaaaacttgctaagaaacagagggtctcgatcggagaccaagctccggggaacaccatgaattttgaccaccatgtcctggaataaagtggccaccatgaaagcagtgtgcgcagtaggaagcatccccagatgaacccctttagaaaaacgatccacgaccaccaatatgactgtgtgacctttgtacggcggcagcccaacaataaaatctaaggacaggtcctcccatggacgatgaggaaccgggagagggcaaagaaggccagcaagcttctttgtttcgtatttagtggactgacagtcacggcagttggccacaaaggtcgcgacatcctcacgcaaaccaggccaatagaagttctcagaaacgcgagcaatcgtcttggcaatgccagagtggcccccagtgggggtcgcatgaaattcaacgaggagggtaggaataataggaatatcacgtggtaaccatatgcggtgacggtgcaaaataagattgttaaccacagagaacccagggtgtttggcgggatgattagcaatgtcctgtcgacgatgcacatagtcagaatgttggtcgagctgagaacagagttcgtccatgaaggtcaagcatggaaccgaaagcatgagagcaagggaggaatcagggtctggaacacgggagagagcatcagcagcctgattgctagcaccggaccgataatggatttcgtaatcgtagcccatgagcctggcgagatacatgtgctgctcgggtgtctggaccacctgggtgagaagctccttcaagctccggtggtcggtcagaatgacaaaacggtgtccgagcaaatattgcctccattttttgacggcggccgtaatagcgtacaattcacggacatacgttgatgatcggagcaatttggcactaaagggtttactgaaataggcaatggggtgccccttctgagagagcacagcacccaagcccaccccagaggcgtcagtctcaatagtgaagggaaggtgaaaatccgggagagctaacaccggtgcggaggatagagcgagcttcaattggtcaaatgcagcctgagtaacatcagtccattgaaagggatccaatgtggtagctttgaccaagggggcagcaatcgtagcatagcccttgatgaatcttctgtaaaacccagctaatccgaggaagctacgaagagctttggcggtgcgcggggaaggccattgacggacagcttcaatcttgtcggtaagaggttccacgccattgaaggagaccaagtggcctaagtactcgacctgtctctgtgcaaaggtacacttagaaagttttaaggcaaattgatgtgtcagtagtaccttgaaggtgatttccaagtgttgcagatgagcatccatggaagtgctataaatgagaatatcatcgaagaagacgataatgaaacgccgcaagtaaggctgaaaaatcgaattcatggttgcctggaacgatgatggagcattacacaaaccaaatggcattaccttgaattcgtaatggccatggtgagtacgaaatgcagttttcggaatgtcctcaggattcatacgaatctgatgataaccttggagcaaatccagcttggaaaaatagcaggcgccgcctaattcgtcaaggagctcatcaatcgttggaattggaaaacgatcccgtatggtaagcgcattcaaggctctgtagtcgacgcagaaccgccaagagccgtcgtgtttcttaaccaggaggaccgaagaagaaaacggactggtgctgggctgaatgagacctttctggagcatagcatcaacctgttgctcgatttcttgtttctgatagtgggggtagcgatacggtcgaacgttgaccggagttgcctgagggatcaagtggatgtggtggtctgtagctcgagccggcggtagggtagaaggagtggtgaagagagcctcgaatcggcgcagcaagtcctgaattggggcagggaactcctgtgacagggaaggggtcgaattagatagcaaggtaatgtgataaaacagagcatcaccttgtgttcgactgagccggcgaagctggaccggagtgaggaggtgaagtttagcatctaagtcaccctggagccgaatgaggcggccgtctgaaaaaaattgcatcgaaagtgtgttgtaatcggtaagcacgggtcccaaggcttttaaccattggaccccaagtactacgttagctccggatatgggaaggatatacaaatccactataaatgtattgttctgaatgttgatggcaacagcttggcacatgcaactgcaactcaattgttgcccatttccgaccataacgcgcaacggggtggtggaaatggagggaaggcccaacttctcgaccagctgttgctgaatgaagttgtgggtgctccctccgtccaccaggagcactacttcaacgtcagcaatggaagccacgaaacgcagcgtttcgggcgctaagtgaccggccatggagtttaaactaagttgggccggatgcgggtcatgggcttcagttgggtccgggtcgggttcgagggtcgggtcaagtggggctatatgtggtgggtcaggagcagcgtccccttccgcgatgaagagaaataccctagaggcacagcggtgacctctgtggtacttctcatcgcagctaaagcagaggccgcgctcacggcggctggcaatctcttcagaggtcaggcgtttgaaaggttgggtgggggaaggtggaggaggtggcggtcgtatggctgacggggaagggaaaaggggtgaaaggggttgcggccgtggtgagaaggatgaagaagaaagtgagggagggcgagaacgcatggtggacggtggtggtcggaggtcacccagcttttcctcctggaggcgcgcgaggccggccgcctgtgacagagtgaggggttggtgggcctgaacctcacggcggatctccggagtcagcccggaaatgaagcagctgaggaggaaggccggcggaatcccgacgacacgatttgctaaatcctcaaactcagagaggtaagaagctactgatcccttttgcatgagtttgcaaagagtacccgtggggtcctcatattgtgatggtgcaaatcgattttgtaatgcttgaaggaaaacaggccacgaagtgaattgaccattactggtcatccactgaaaccatgctaaggcccttccttccatataaaatgacgcaatcgttaatcggtcgtactccggggtcccatgatactcgaagtactggttgatcttaaagatccaaccaagggcgtccgttccatcaaaacgtggaacatctaatttgaggcgatggtgttgtgcaggaacaggaaaagggcgtggaagggatgaaggcatgtgggaagcaggggaaaaaagaggggtaatgtgagagatgaagtcatcgattttgctggagagagtaagttgctgtgtggtgaggcgaacgaggagttcttcaattttatcagaggacgaagggtgcgtcattggaggacaacgagagcaccaatgatacgtgatgcagggggaattctggtttcgaggaccagggcctccaaaagggtaaggaaaggaaataactaagaaaagataattctcatattcatccctctttctgtgaatcattacatttatttatactgattcttataacagaattgctattctatggaatgttcaggattcaagtttgttacaattatctcccacgtgttgtaattgctctaacagaatgcatatatgcctttaataccatcccgcccctttcagatgtaatctttgaggtacgttggtctctctacccttctcttgggcctttgctctttgttttctgaaattgcttgttgcaccttatcctgctggttgttaatctgcattgcttgttgcacctcattctgttgattgtctccctctgctatgtttccccctgtatcacccactgagctggttgttctgcaggtctagattttttatgttctgaaggcttgatattatttgtggaatttgtccctgtaaaaggttactgtgtaaatcaagttggacaagagttgtgctgagattaaatagccatgaagggatttgctgattgagattgttaattgaaagatcaaggacttggagatgtgtaaagttggtttttcctattggtggtcctaagttatcaatttgacagctctccaagtgtagttctgatagagatggatgtgcactcagttattgaagccagttatcttgttcttaaaggtctgacccactcatatcacgtactctaagaatatatccttgatatccaattatggtttctattctgaagagcatannnnnnnnnnnnnnnnnnnnnnnnnnnnnnnnnnnnnnnnnnnnnnnnnnnnnnnnnnnnnnnnnnnnnnnnnnnnnnnnnnnnnnnnnnnnnnnnnnnnnnnnnnnnnnnnnnnnnnnnnnnnnnnnnnnnnnnnnnnnnnnnnnnnnnnnnnnnnnnnnnnnnnnnnnnnnnnnnnnnnnnnnnnnnnnnnnnnnnnnnnnnnnnnnnnnnnnnnnnnnnnnnnnnnnnnnnnnnnnnnnnnnnnnnnnnnnnnnnnnnnnnnnnnnnnnnnnnnnnnnnnnnnnnnnnnnnnnnnnnnnnnnnnnnnnnnnnnnnnnnnnnnnnnnnnnnnnnnnnnnnnnnnnnnnnnnnnnnnnnnnnnnnnnnnnnnnnnnnnnnnnnnnnnnnnnnnnnnnnnnnnnnnnnnnnnnnnnnnnnnnnnnnnnnnnnnnnnnnnnnnnnnnnnnnnnnnnnnnnnnnnnnnnnnnnnnnnnnnnnnnnnnnnnnnnnnnnnnnnnnnnnnnnnnnnnnnnnnnnnnnnnnnnnnnnnnnnnnnnnnnnnnnnnnnnnnnnnnnnnnnnnnnnnnnnnnnnnnnnnnnnnnnnnnnnnnnnnnnnnnnnnnnnnnnnnnnnnnnnnnnnnnnnnnnnnnnnnnnnnnnnnnnnnnnnnnnnnnnnnnnnnnnnnnnnnnnnnnnnnnnnnnnnnnnnnnnnnnnnnnnnnnnnnnnnnnnnnnnnnnnnnnnnnnnnnnnnnnnnnnnnnnnnnnnnnnnnnnnnnnnnnnnnnnnnnnnnnnnnnnnnnnnnnnnnnnnnnnnnnnnnnnnnnnnnnnnnnnnnnnnnnnnnnnnnnnnnnnnnnnnnnnnnnnnnnnnnnnnnnnnnnnnnnnnnnnnnnnnnnnnnnnnnnnnnnnnnnnnnnnnnnnnnnnnnnnnnnnnnnnnnnnnnnnnnnnnnnnnnnnnnnnnnnnnnnnnnnnnnnnnnnnnnnnnnnnnnnnnnnnnnnnnnnnnnnnnnnnnnnnnnnnnnnnnnnnnnnnnnnnnnnnnnnnnnnnnnnnnnnnnnnnnnnnnnnnnnnnnnnnnnnnnnnnnnnnnnnnnnnnnnnnnnnnnnnnnnnnnnnnnnnnnnnnnnnnnnnnnnnnnnnnnnnnnnnnnnnnnnnnnnnnnnnnnnnnnnnnnnnnnnnnnnnnnnnnnnnnnnnnnnnnnnnnnnnnnnnnnnnnnnnnnnnnnnnnnnnnnnnnnnnnnnnnnnnnnnnnnnnnnnnnnnnnnnnnnnnnnnnnnnnnnnnnnnnnnnnnnnnnnnnnnnnnnnnnnnnnnnnnnnnnnnnnnnnnnnnnnnnnnnnnnnnnnnnnnnnnnnnnnnnnnnnnnnnnnnnnnnnnnnnnnnnnnnnnnnnnnnnnnnnnnnnnnnnnnnnnnnnnnnnnnnnnnnnnnnnnnnnnnnnnnnnnnnnnnnnnnnnnnnnnnnnnnnnnnnnnnnnnnnnnnnnnnnnnnnnnnnnnnnnnnnnnnnnnnnnnnnnnnnnnnnnnnnnnnnnnnnnnnnnnnnnnnnnnnnnnnnnnnnnnnnnnnnnnnnnnnnnnnnnnnnnnnnnnnnnnnnnnnnnnnnnnnnnnnnnnnnnnnnnnnnnnnnnnnnnnnnnnnnnnnnnnnnnnnnnnnnnnnnnnnnnnnnnnnnnnnnnnnnnnnnnnnnnnnnnnnnnnnnnnnnnnnnnnnnnnnnnnnnnnnnnnnnnnnnnnnnnnnnnnnnnnnnnnnnnnnnnnnnnnnnnnnnnnnnnnnnnnnnnnnnnnnnnnnnnnnnnnnnnnnnnnnnnnnnnnnnnnnnnnnnnnnnnnnnnnnnnnnnnnnnnnnnnnnnnnnnnnnnnnnnnnnnnnnnnnnnnnnnnnnnnnnnnnnnnnnnnnnnnnnnnnnnnnnnnnnnnnnnnnnnnnnnnnnnnnnnnnnnnnnnnnnnnnnnnnnnnnnnnnnnnnnnnnnnnnnnnnnnnnnnnnnnnnnnnnnnnnnnnnnnnnnnnnnnnnnnnnnnnnnnnnnnnnnnnnnnnnnnnnnnnnnnnnnnnnnnnnnnnnnnnnnnnnnnnnnnnnnnnnnnnnnnnnnnnnnnnnnnnnnnnnnnnnnnnnnnnnnnnnnnnnnnnnnnnnnnnnnnnnnnnnnnnnnnnnnnnnnnnnnnnnnnnnnnnnnnnnnnnnnnnnnnnnnnnnnnnnnnnnnnnnnnnnnnnnnnnnnnnnnnnnnnnnnnnnnnnnnnnnnnnnnnnnnnnnnnnnnnnnnnnnnnnnnnnnnnnnnnnnnnnnnnnnnnnnnnnnnnnnnnnnnnnnnnnnnnnnnnnnnnnnnnnnnnnnnnnnnnnnnnnnnnnnnnnnnnnnnnnnnnnnnnnnnnnnnnnnnnnnnnnnnnnnnnnnnnnnnnnnnnnnnnnnnnnnnnnnnnnnnnnnnnnnnnnnnnnnnnnnnnnnnnnnnnnnnnnnnnnnnnnnnnnnnnnnnnnnnnnnnnnnnnnnnnnnnnnnnnnnnnnnnnnnnnnnnnnnnnnnnnnnnnnnnnnnnnnnnnnnnnnnnnnnnnnnnnnnnnnnnnnnnnnnnnnnnnnnnnnnnnnnnnnnnnnnnnnnnnnnnnnnnnnnnnnnnnnnnnnnnnnnnnnnnnnnnnnnnnnnnnnnnnnnnnnnnnnnnnnnnnnnnnnnnnnnnnnnnnnnnnnnnnnnnnnnnnnnnnnnnnnnnnnnnnnnnnnnnnnnnnnnnnnnnnnnnnnnnnnnnnnnnnnnnnnnnnnnnnnnnnnnnnnnnnnnnnnnnnnnnnnnnnnnnnnnnnnnnnnnnnnnnnnnnnnnnnnnnnnnnnnnnnnnnnnnnnnnnnnnnnnnnnnnnnnnnnnnnnnnnnnnnnnnnnnnnnnnnnnnnnnnnnnnnnnnnnnnnnnnnnnnnnnnnnnnnnnnnnnnnnnnnnnnnnnnnnnnnnnnnnnnnnnnnnnnnnnnnnnnnnnnnnnnnnnnnnnnnnnnnnnnnnnnnnnnnnnnnnnnnnnnnnnnnnnnnnnnnnnnnnnnnnnnnnnnnnnnnnnnnnnnnnnnnnnnnnnnnnnnnnnnnnnnnnnnnnnnnnnnnnnnnnnnnnnnnnnnnnnnnnnnnnnnnnnnnnnnnnnnnnnnnnnnnnnnnnnnnnnnnnnnnnnnnnnnnnnnnnnnnnnnnnnnnnnnnnnnnnnnnnnnnnnnnnnnnnnnnnnnnnnnnnnnnnnnnnnnnnnnnnnnnnnnnnnnnnnnnnnnnnnnnnnnnnnnnnnnnnnnnnnnnnnnnnnnnnnnnnnnnnnnnnnnnnnnnnnnnnnnnnnnnnnnnnnnnnnnnnnnnnnnnnnnnnnnnnnnnnnnnnnnnnnnnnnnnnnnnnnnnnnnnnnnnnnnnnnnnnnnnnnnnnnnnnnnnnnnnnnnnnnnnnnnnnnnnnnnnnnnnnnnnnnnnnnnnnnnnnnnnnnnnnnnnnnnnnnnnnnnnnnnnnnnnnnnnnnnnnnnnnnnnnnnnnnnnnnnnnnnnnnnnnnnnnnnnnnnnnnnnnnnnnnnnnnnnnnnnnnnnnnnnnnnnnnnnnnnnnnnnnnnnnnnnnnnnnnnnnnnnnnnnnnnnnnnnnnnnnnnnnnnnnnnnnnnnnnnnnnnnnnnnnnnnnnnnnnnnnnnnnnnnnnnnnnnnnnnnnnnnnnnnnnnnnnnnnnnnnnnnnnnnnnnnnnnnnnnnnnnnnnnnnnnnnnnnnnnnnnnnnnnnnnnnnnnnnnnnnnnnnnnnnnnnnnnnnnnnnnnnnnnnnnnnnnnnnnnnnnnnnnnnnnnnnnnnnnnnnnnnnnnnnnnnnnnnnnnnnnnnnnnnnnnnnnnnnnnnnnnnnnnnnnnnnnnnnnnnnnnnnnnnnnnnnnnnnnnnnnnnnnnnnnnnnnnnnnnnnnnnnnnnnnnnnnnnnnnnnnnnnnnnnnnnnnnnnnnnnnnnnnnnnnnnnnnnnnnnnnnnnnnnnnnnnnnnnnnnnnnnnnnnnnnnnnnnnnnnnnnnnnnnnnnnnnnnnnnnnnnnnnnnnnnnnnnnnnnnnnnnnnnnnnnnnnnnnnnnnnnnnnnnnnnnnnnnnnnnnnnnnnnnnnnnnnnnnnnnnnnnnnnnnnnnnnnnnnnnnnnnnnnnnnnnnnnnnnnnnnnnnnnnnnnnnnnnnnnnnnnnnnnnnnnnnnnnnnnnnnnnnnnnnnnnnnnnnnnnnnnnnnnnnnnnnnnnnnnnnnnnnnnnnnnnnnnnnnnnnnnnnnnnnnnnnnnnnnnnnnnnnnnnnnnnnnnnnnnnnnnnnnnnnnnnnnnnnnnnnnnnnnnnnnnnnnnnnnnnnnnnnnnnnnnnnnnnnnnnnnnnnnnnnnnnnnnnnnnnnnnnnnnnnnnnnnnnnnnnnnnnnnnnnnnnnnnnnnnnnnnnnnnnnnnnnnnnnnnnnnnnnnnnnnnnnnnnnnnnnnnnnnnnnnnnnnnnnnnnnnnnnnnnnnnnnnnnnnnnnnnnnnnnnnnnnnnnnnnnnnnnnnnnnnnnnnnnnnnnnnnnnnnnnnnnnnnnnnnnnnnnnnnnnnnnnnnnnnnnnnnnnnnnnnnnnnnnnnnnnnnnnnnnnnnnnnnnnnnnnnnnnnnnnnnnnnnnnnnnnnnnnnnnnnnnnnnnnnnnnnnnnnnnnnnnnnnnnnnnnnnnnnnnnnnnnnnnnnnnnnnnnnnnnnnnnnnnnnnnnnnnnnnnnnnnnnnnnnnnnnnnnnnnnnnnnnnnnnnnnnnnnnnnnnnnnnnnnnnnnnnnnnnnnnnnnnnnnnnnnnnnnnnnnnnnnnnnnnnnnnnnnnnnnnnnnnnnnnnnnnnnnnnnnnnnnnnnnnnnnnnnnnnnnnnnnnnnnnnnnnnnnnnnnnnnnnnnnnnnnnnnnnnnnnnnnnnnnnnnnnnnnnnnnnnnnnnnnnnnnnnnnnnnnnnnnnnnnnnnnnnnnnnnnnnnnnnnnnnnnnnnnnnnnnnnnnnnnnnnnnnnnnnnnnnnnnnnnnnnnnnnnnnnnnnnnnnnnnnnnnnnnnnnnnnnnnnnnnnnnnnnnnnnnnnnnnnnnnnnnnnnnnnnnnnnnnnnnnnnnnnnnnnnnnnnnnnnnnnnnnnnnnnnnnnnnnnnnnnnnnnnnnnnnnnnnnnnnnnnnnnnnnnnnnnnnnnnnnnnnnnnnnnnnnnnnnnnnnnnnnnnnnnnnnnnnnnnnnnnnnnnnnnnnnnnnnnnnnnnnnnnnnnnnnnnnnnnnnnnnnnnnnnnnnnnnnnnnnnnnnnnnnnnnnnnnnnnnnnnnnnnnnnnnnnnnnnnnnnnnnnnnnnnnnnnnnnnnnnnnnnnnnnnnnnnnnnnnnnnnnnnnnnnnnnnnnnnnnnnnnnnnnnnnnnnnnnnnnnnnnnnnnnnnnnnnnnnnnnnnnnnnnnnnnnnnnnnnnnnnnnnnnnnnnnnnnnnnnnnnnnnnnnnnnnnnnnnnnnnnnnnnnnnnnnnnnnnnnnnnnnnnnnnnnnnnnnnnnnnnnnnnnnnnnnnnnnnnnnnnnnnnnnnnnnnnnnnnnnnnnnnnnnnnnnnnnnnnnnnnnnnnnnnnnnnnnnnnnnnnnnnnnnnnnnnnnnnnnnnnnnnnnnnnnnnnnnnnnnnnnnnnnnnnnnnnnnnnnnnnnnnnnnnnnnnnnnnnnnnnnnnnnnnnnnnnnnnnnnnnnnnnnnnnnnnnnnnnnnnnnnnnnnnnnnnnnnnnnnnnnnnnnnnnnnnnnnnnnnnnnnnnnnnnnnnnnnnnnnnnnnnnnnnnnnnnnnnnnnnnnnnnnnnnnnnnnnnnnnnnnnnnnnnnnnnnnnnnnnnnnnnnnnnnnnnnnnnnnnnnnnnnnnnnnnnnnnnnnnnnnnnnnnnnnnnnnnnnnnnnnnnnnnnnnnnnnnnnnnnnnnnnnnnnnnnnnnnnnnnnnnnnnnnnnnnnnnnnnnnnnnnnnnnnnnnnnnnnnnnnnnnnnnnnnnnnnnnnnnnnnnnnnnnnnnnnnnnnnnnnnnnnnnnnnnnnnnnnnnnnnnnnnnnnnnnnnnnnnnnnnnnnnnnnnnnnnnnnnnnnnnnnnnnnnnnnnnnnnnnnnnnnnnnnnnnnnnnnnnnnnnnnnnnnnnnnnnnnnnnnnnnnnnnnnnnnnnnnnnnnnnnnnnnnnnnnnnnnnnnnnnnnnnnnnnnnnnnnnnnnnnnnnnnnnnnnnnnnnnnnnnnnnnnnnnnnnnnnnnnnnnnnnnnnnnnnnnnnnnnnnnnnnnnnnnnnnnnnnnnnnnnnnnnnnnnnnnnnnnnnnnnnnnnnnnnnnnnnnnnnnnnnnnnnnnnnnnnnnnnnnnnnnnnnnnnnnnnnnnnnnnnnnnnnnnnnnnnnnnnnnnnnnnnnnnnnnnnnnnnnnnnnnnnnnnnnnnnnnnnnnnnnnnnnnnnnnnnnnnnnnnnnnnnnnnnnnnnnnnnnnnnnnnnnnnnnnnnnnnnnnnnnnnnnnnnnnnnnnnnnnnnnnnnnnnnnnnnnnnnnnnnnnnnnnnnnnnnnnnnnnnnnnnnnnnnnnnnnnnnnnnnnnnnnnnnnnnnnnnnnnnnnnnnnnnnnnnnnnnnnnnnnnnnnnnnnnnnnnnnnnnnnnnnnnnnnnnnnnnnnnnnnnnnnnnnnnnnnnnnnnnnnnnnnnnnnnnnnnnnnnnnnnnnnnnnnnnnnnnnnnnnnnnnnnnnnnnnnnnnnnnnnnnnnnnnnnnnnnnnnnnnnnnnnnnnnnnnnnnnnnnnnnnnnnnnnnnnnnnnnnnnnnnnnnnnnnnnnnnnnnnnnnnnnnnnnnnnnnnnnnnnnnnnnnnnnnnnnnnnnnnnnnnnnnnnnnnnnnnnnnnnnnnnnnnnnnnnnnnnnnnnnnnnnnnnnnnnnnnnnnnnnnnnnnnnnnnnnnnnnnnnnnnnnnnnnnnnnnnnnnnnnnnnnnnnnnnnnnnnnnnnnnnnnnnnnnnnnnnnnnnnnnnnnnnnnnnnnnnnnnnnnnnnnnnnnnnnnnnnnnnnnnnnnnnnnnnnnnnnnnnnnnnnnnnnnnnnnnnnnnnnnnnnnnnnnnnnnnnnnnnnnnnnnnnnnnnnnnnnnnnnnnnnnnnnnnnnnnnnnnnnnnnnnnnnnnnnnnnnnnnnnnnnnnnnnnnnnnnnnnnnnnnnnnnnnnnnnnnnnnnnnnnnnnnnnnnnnnnnnnnnnnnnnnnnnnnnnnnnnnnnnnnnnnnnnnnnnnnnnnnnnnnnnnnnnnnnnnnnnnnnnnnnnnnnnnnnnnnnnnnnnnnnnnnnnnnnnnnnnnnnnnnnnnnnnnnnnnnnnnnnnnnnnnnnnnnnnnnnnnnnnnnnnnnnnnnnnnnnnnnnnnnnnnnnnnnnnnnnnnnnnnnnnnnnnnnnnnnnnnnnnnnnnnnnnnnnnnnnnnnnnnnnnnnnnnnnnnnnnnnnnnnnnnnnnnnnnnnnnnnnnnnnnnnnnnnnnnnnnnnnnnnnnnnnnnnnnnnnnnnnnnnnnnnnnnnnnnnnnnnnnnnnnnnnnnnnnnnnnnnnnnnnnnnnnnnnnnnnnnnnnnnnnnnnnnnnnnnnnnnnnnnnnnnnnnnnnnnnnnnnnnnnnnnnnnnnnnnnnnnnnnnnnnnnnnnnnnnnnnnnnnnnnnnnnnnnnnnnnnnnnnnnnnnnnnnnnnnnnnnnnnnnnnnnnnnnnnnnnnnnnnnnnnnnnnnnnnnnnnnnnnnnnnnnnnnnnnnnnnnnnnnnnnnnnnnnnnnnnnnnnnnnnnnnnnnnnnnnnnnnnnnnnnnnnnnnnnnnnnnnnnnnnnnnnnnnnnnnnnnnnnnnnnnnnnnnnnnnnnnnnnnnnnnnnnnnnnnnnnnnnnnnnnnnnnnnnnnnnnnnnnnnnnnnnnnnnnnnnnnnnnnnnnnnnnnnnnnnnnnnnnnnnnnnnnnnnnnnnnnnnnnnnnnnnnnnnnnnnnnnnnnnnnnnnnnnnnnnnnnnnnnnnnnnnnnnnnnnnnnnnnnnnnnnnnnnnnnnnnnnnnnnnnnnnnnnnnnnnnnnnnnnnnnnnnnnnnnnnnnnnnnnnnnnnnnnnnnnnnnnnnnnnnnnnnnnnnnnnnnnnnnnnnnnnnnnnnnnnnnnnnnnnnnnnnnnnnnnnnnnnnnnnnnnnnnnnnnnnnnnnnnnnnnnnnnnnnnnnnnnnnnnnnnnnnnnnnnnnnnnnnnnnnnnnnnnnnnnnnnnnnnnnnnnnnnnnnnnnnnnnnnnnnnnnnnnnnnnnnnnnnnnnnnnnnnnnnnnnnnnnnnnnnnnnnnnnnnnnnnnnnnnnnnnnnnnnnnnnnnnnnnnnnnnnnnnnnnnnnnnnnnnnnnnnnnnnnnnnnnnnnnnnnnnnnnnnnnnnnnnnnnnnnnnnnnnnnnnnnnnnnnnnnnnnnnnnnnnnnnnnnnnnnnnnnnnnnnnnnnnnnnnnnnnnnnnnnnnnnnnnnnnnnnnnnnnnnnnnnnnnnnnnnnnnnnnnnnnnnnnnnnnnnnnnnnnnnnnnnnnnnnnnnnnnnnnnnnnnnnnnnnnnnnnnnnnnnnnnnnnnnnnnnnnnnnnnnnnnnnnnnnnnnnnnnnnnnnnnnnnnnnnnnnnnnnnnnnnnnnnnnnnnnnnnnnnnnnnnnnnnnnnnnnnnnnnnnnnnnnnnnnnnnnnnnnnnnnnnnnnnnnnnnnnnnnnnnnnnnnnnnnnnnnnnnnnnnnnnnnnnnnnnnnnnnnnnnnnnnnnnnnnnnnnnnnnnnnnnnnnnnnnnnnnnnnnnnnnnnnnnnnnnnnnnnnnnnnnnnnnnnnnnnnnnnnnnnnnnnnnnnnnnnnnnnnnnnnnnnnnnnnnnnnnnnnnnnnnnnnnnnnnnnnnnnnnnnnnnnnnnnnnnnnnnnnnnnnnnnnnnnnnnnnnnnnnnnnnnnnnnnnnnnnnnnnnnnnnnnnnnnnnnnnnnnnnnnnnnnnnnnnnnnnnnnnnnnnnnnnnnnnnnnnnnnnnnnnnnnnnnnnnnnnnnnnnnnnnnnnnnnnnnnnnnnnnnnnnnnnnnnnnnnnnnnnnnnnnnnnnnnnnnnnnnnnnnnnnnnnnnnnnnnnnnnnnnnnnnnnnnnnnnnnnnnnnnnnnnnnnnnnnnnnnnnnnnnnnnnnnnnnnnnnnnnnnnnnnnnnnnnnnnnnnnnnnnnnnnnnnnnnnnnnnnnnnnnnnnnnnnnnnnnnnnnnnnnnnnnnnnnnnnnnnnnnnnnnnnnnnnnnnnnnnnnnnnnnnnnnnnnnnnnnnnnnnnnnnnnnnnnnnnnnnnnnnnnnnnnnnnnnnnnnnnnnnnnnnnnnnnnnnnnnnnnnnnnnnnnnnnnnnnnnnnnnnnnnnnnnnnnnnnnnnnnnnnnnnnnnnnnnnnnnnnnnnnnnnnnnnnnnnnnnnnnnnnnnnnnnnnnnnnnnnnnnnnnnnnnnnnnnnnnnnnnnnnnnnnnnnnnnnnnnnnnnnnnnnnnnnnnnnnnnnnnnnnnnnnnnnnnnnnnnnnnnnnnnnnnnnnnnnnnnnnnnnnnnnnnnnnnnnnnnnnnnnnnnnnnnnnnnnnnnnnnnnnnnnnnnnnnnnnnnnnnnnnnnnnnnnnnnnnnnnnnnnnnnnnnnnnnnnnnnnnnnnnnnnnnnnnnnnnnnnnnnnnnnnnnnnnnnnnnnnnnnnnnnnnnnnnnnnnnnnnnnnnnnnnnnnnnnnnnnnnnnnnnnnnnnnnnnnnnnnnnnnnnnnnnnnnnnnnnnnnnnnnnnnnnnnnnnnnnnnnnnnnnnnnnnnnnnnnnnnnnnnnnnnnnnnnnnnnnnnnnnnnnnnnnnnnnnnnnnnnnnnnnnnnnnnnnnnnnnnnnnnnnnnnnnnnnnnnnnnnnnnnnnnnnnnnnnnnnnnnnnnnnnnnnnnnnnnnnnnnnnnnnnnnnnnnnnnnnnnnnnnnnnnnnnnnnnnnnnnnnnnnnnnnnnnnnnnnnnnnnnnnnnnnnnnnnnnnnnnnnnnnnnnnnnnnnnnnnnnnnnnnnnnnnnnnnnnnnnnnnnnnnnnnnnnnnnnnnnnnnnnnnnnnnnnnnnnnnnnnnnnnnnnnnnnnnnnnnnnnnnnnnnnnnnnnnnnnnnnnnnnnnnnnnnnnnnnnnnnnnnnnnnnnnnnnnnnnnnnnnnnnnnnnnnnnnnnnnnnnnnnnnnnnnnnnnnnnnnnnnnnnnnnnnnnnnnnnnnnnnnnnnnnnnnnnnnnnnnnnnnnnnnnnnnnnnnnnnnnnnnnnnnnnnnnnnnnnnnnnnnnnnnnnnnnnnnnnnnnnnnnnnnnnnnnnnnnnnnnnnnnnnnnnnnnnnnnnnnnnnnnnnnnnnnnnnnnnnnnnnnnnnnnnnnnnnnnnnnnnnnnnnnnnnnnnnnnnnnnnnnnnnnnnnnnnnnnnnnnnnnnnnnnnnnnnnnnnnnnnnnnnnnnnnnnnnnnnnnnnnnnnnnnnnnnnnnnnnnnnnnnnnnnnnnnnnnnnnnnnnnnnnnnnnnnnnnnnnnnnnnnnnnnnnnnnnnnnnnnnnnnnnnnnnnnnnnnnnnnnnnnnnnnnnnnnnnnnnnnnnnnnnnnnnnnnnnnnnnnnnnnnnnnnnnnnnnnnnnnnnnnnnnnnnnnnnnnnnnnnnnnnnnnnnnnnnnnnnnnnnnnnnnnnnnnnnnnnnnnnnnnnnnnnnnnnnnnnnnnnnnnnnnnnnnnnnnnnnnnnnnnnnnnnnnnnnnnnnnnnnnnnnnnnnnnnnnnnnnnnnnnnnnnnnnnnnnnnnnnnnnnnnnnnnnnnnnnnnnnnnnnnnnnnnnnnnnnnnnnnnnnnnnnnnnnnnnnnnnnnnnnnnnnnnnnnnnnnnnnnnnnnnnnnnnnnnnnnnnnnnnnnnnnnnnnnnnnnnnnnnnnnnnnnnnnnnnnnnnnnnnnnnnnnnnnnnnnnnnnnnnnnnnnnnnnnnnnnnnnnnnnnnnnnnnnnnnnnnnnnnnnnnnnnnnnnnnnnnnnnnnnnnnnnnnnnnnnnnnnnnnnnnnnnnnnnnnnnnnnnnnnnnnnnnnnnnnnnnnnnnnnnnnnnnnnnnnnnnnnnnnnnnnnnnnnnnnnnnnnnnnnnnnnnnnnnnnnnnnnnnnnnnnnnnnnnnnnnnnnnnnnnnnnnnnnnnnnnnnnnnnnnnnnnnnnnnnnnnnnnnnnnnnnnnnnnnnnnnnnnnnnnnnnnnnnnnnnnnnnnnnnnnnnnnnnnnnnnnnnnnnnnnnnnnnnnnnnnnnnnnnnnnnnnnnnnnnnnnnnnnnnnnnnnnnnnnnnnnnnnnnnnnnnnnnnnnnnnnnnnnnnnnnnnnnnnnnnnnnnnnnnnnnnnnnnnnnnnnnnnnnnnnnnnnnnnnnnnnnnnnnnnnnnnnnnnnnnnnnnnnnnnnnnnnnnnnnnnnnnnnnnnnnnnnnnnnnnnnnnnnnnnnnnnnnnnnnnnnnnnnnnnnnnnnnnnnnnnnnnnnnnnnnnnnnnnnaatgcttgtttaacttggtctaccataattattgagagcataacttttttcttgtataagtcttggtccaaatttctccatatattatagatcatatttagcttaaaaagtaaattagaggatatgatataccaagaagtgtggcatgtttttttaaattatttatctatggtcttagctattttattgttagaccacaagtcttcatatattaaagtctttgtctgaatttcatttacttgtgtggtgatattttaagaatagtgatagaagagaaaaataaatatataatttattgaaatatctaacttatgaagatttgcaatcttaatgcataagcttttcagtttatatattatcattatttggaaatattaatttgttgtgttaattgtctatttctaattaatttgaaaatgaatcttaattttttatcataaaaattagtatcatattttttattttctttacaagttatcaacttaaatactaataggagcaacataattttaatttccattttatttttaaaataattttaagtgtcaaatttaagcaatcataaaaatactcacgttctatataatatttttaaaaaataattcatgagatcacttaaataatctacaaagaaatataatttattcttgtgccaaatgaacaacaaaaaaaagtcttgtattattaaattcaagtcttctattacatgcaatttgaacctataactaattttaaatgatcaaaatttttttattcaaaataaaagaaaagaaaaaaaaattgtcttctagacaaaccacagacaactccaccaaatccatatcaaggtccccactttttcaacttgaaccataggccactccatcaaatctatgccaaagtttcttatcattgacaataaatgttgagagttaagtcaagcatgaaaaaaaatagggtaaaatatatcatttctatccctataaaattttaatgtgctacttttttttatcctgagttaagtttggaggatagataattatcatgtattcttagattttggtgtctatccctataaaaaggttcttatatttacaattattttatcttttggtcctggaggggaagattcaattcacacataaacatgaacaaaattaataaaaatagggaagcaagctcaggtacaaatgaagtgtaatggaggtatgagacaaagccactacacattccattattcttgagtctgccaccgacctctgcaagcttagcatttgccaattgccatgatgtaatctccttcttgacagtctctcatcaagttggagtggtatcagagcattgaactaagttgatcgttccaatggatgatggttttgattgctgcagataaagtgtcatgtgagtttctgtcccatgagtaaactacacgactaaaaaaaatattgtcgtaactttannnnnnnnnnnnnnnnnnnnnnnnnnnnnnnnnnnnnnnnnnnnnnnnnnnnnnnnnnnnnnnnnnnnnnnnnnnnnnnnnnnnnnnnnnnnnnnnnnnnnnnnnnnnnnnnnnnnnnnnnnnnnnnnnnnnnnnnnnnnnnnnnnnnnnnnnnnnnnnnnnnnnnnnnnnnnnnnnnnnnnnnnnnnnnnnnnnnnnnnnnnnnnnnnnnnnnnnnnnnnnnnnnnnnnnnnnnnnnnnnnnnnnnnnnnnnnnnnnnnnnnnnnnnnnnnnnnnnnnnnnnnnnnnnnnnnnnnnnnnnnnnnnnnnnnnnnnnnnnnnnnnnnnnnnnnnnnnnnnnnnnnnnnnnnnnnnnnnnnnnnnnnnnnnnnnnnnnnnnnnnnnnnnnnnnnnnnnnnnnnnnnnnnnnnnnnnnnnnnnnnnnnnnnnnnnnnnnnnnnnnnnnnnnnnnnnnnnnnnnnnnnnnnnnnnnnnnnnnnnnnnnnnnnnnnnnnnnnnnnnnnnnnnnnnnnnnnnnnnnnnnnnnnnnnnnnnnnnnnnnnnnnnnnnnnnnnnnnnnnnnnnnnnnnnnnnnnnnnnnnnnnnnnnnnnnnnnnnnnnnnnnnnnnnnnnnnnnnnnnnnnnnnnnnnnnnnnnnnnnnnnnnnnnnnnnnnnnnnnnnnnnnnnnnnnnnnnnnnnnnnnnnnnnnnnnnnnnnnnnnnnnnnnnnnnnnnnnnnnnnnnnnnnnnnnnnnnnnnnnnnnnnnnnnnnnnnnnnnnnnnnnnnnnnnnnnnnnnnnnnnnnnnnnnnnnnnnnnnnnnnnnnnnnnnnnnnnnnnnnnnnnnnnnnnnnnnnnnnnnnnnnnnnnnnnnnnnnnnnnnnnnnnnnnnnnnnnnnnnnnnnnnnnnnnnnnnnnnnnnnnnnnnnnnnnnnnnnnnnnnnnnnnnnnnnnnnnnnnnnnnnnnnnnnnnnnnnnnnnnnnnnnnnnnnnnnnnnnnnnnnnnnnnnnnnnnnnnnnnnnnnnnnnnnnnnnnnnnnnnnnnnnnnnnnnnnnnnnnnnnnnnnnnnnnnnnnnnnnnnnnnnnnnnnnnnnnnnnnnnnnnnnnnnnnnnnnnnnnnnnnnnnnnnnnnnnnnnnnnnnnnnnnnnnnnnnnnnnnnnnnnnnnnnnnnnnnnnnnnnnnnnnnnnnnnnnnnnnnnnnnnnnnnnnnnnnnnnnnnnnnnnnnnnnnnnnnnnnnnnnnnnnnnnnnnnnnnnnnnnnnnnnnnnnnnnnnnnnnnnnnnnnnnnnnnnnnnnnnnnnnnnnnnnnnnnnnnnnnnnnnnnnnnnnnnnnnnnnnnnnnnnnnnnnnnnnnnnnnnnnnnnnnnnnnnnnnnnnnnnnnnnnnnnnnnnnnnnnnnnnnnnnnnnnnnnnnnnnnnnnnnnnnnnnnnnnnnnnnnnnnnnnnnnnnnnnnnnnnnnnnnnnnnnnnnnnnnnnnnnnnnnnnnnnnnnnnnnnnnnnnnnnnnnnnnnnnnnnnnnnnnnnnnnnnnnnnnnnnnnnnnnnnntcgagtcatcttctccagagacttgcctttaactttgattttaatatagaatttttctaaaatgaagcgtacatgcattacaataaataaaacatttaaactttaattttaatatagaatttttctaaattgttatggtgcatgattaaactttaatcatggagtacacattttttccttatataagtaacatggttttacgtgatttgtttattatttatcttttcttctagttgtgttcattgttgtttgaaaattttctttaatattttgttgtttggacaatcacttagttacaccgtatgaaattcacggattggtttggaggcttgactatcaaatttcatctcgcatcagattaaacatcgcattactataccatatagttatatgtgattttttcccattcaattttatatttagctacacattaaaattaatttataccaaattttttgcatataggttttttttagtgaatcaaattcttttttaattcaaattgggacattagttttcgtatccgttaagaataattgatacctaatttaaataattgtattaaattctaattatcaaaaaatcccgtatttattatcataaaaatatttaacaatttaatcattaatttcgtagtataattgatactggacagctaatatttattgcacttaatttcatttgataataactgatatttcttcaatcgcgtatcatttgttgcaaaacgaacatccaatatcattggagaacaatgttgatgtaacgattaattcattgataatcacatgaatgtattaaatccaggatattaaatttacaaataattttttgtttttcaattatattttaacaataattaagaaataaatctaaatcattctacatttacatttgtttataggtatttgggatattggccggagatgctatatgggaatctaaattttgcttaacacaaatgtggtatgcaaggtaaaatcaaattgaaatatttttaaccaccacttcaaatttttaaaagatttgtttcaaaataaggatatgaagaacaaattgtttttagagaacatttcctccatgatgttttaaaagactaaattaaataagtaataactttaataatagtaatagaaacagtaaataactttaataatagacaatgactaaattaaatatggatttggctattgccatattaacctcggagaggtaaaagatcattaataagtaataactttaataatagtaatagaaacagtagacttgtaagcataaagttgttcctaggaaaacaataagccacaaagaaatccccaagaatgtattcattcctaatccacaaagaaaagcccgtatgcgcttactgtgttgtcaatcccagagggctttccatgaatgatcttctccaaggaattttctataacaaaccaaagaactaaatataacaagctctcaacattactgaaatattctcaaaggaaagatctcaaagggatggcaagcctagtttttttttttttatcatagaaacattatagtttctccctagcaagaataatttgtgatggattgaaatttcctatatgtatctatgaacctgtggcataaagtttgtttttaagcacacatgacatgacatgataatacctagctttggattaccatgtgacaaaaaattactttcctaactttagtttccccgaaaggtaaaattaaccaaatctgaaaagcgtttcgtgtaatattggctacgcatgactaattaacttctgaaacggtcagctacttcataaccttttgatgtcattctccccaacaaaaaacaacttgttacctagcaacagcttgcttgcttgctttctcacgcacttagtgaccctctatgcttgtgaaataaattgttataacctttattgtttttcatcaatattaccaaaatttccttaaaatgttcaatatttcgtaatcttcataattaattcaaaattctcaaaagattagtatatgaccttttttcttgtttgtactaggagaggaataaatgaaaaaaaaatcagaaatttgtggattgctatttgctcaaatgatgggtctattagttctttgaaatttgtattgatcatatttatttttaccttttaatagatatattgtgctgtcatcccaagagaaggatcaaacattgatgatgcagaggttctaagatattgcaagaagaatcttgcatctttcaaagtccctaaaaaggtcttcattactgattctttgcccaagactgccaccggaaagattttgcgtcgtcttgcggcacaacactttgtctctcaaatttgagcaacccaagtcctacttttgaagcctccatacctggccatacatagttggagtccacacacataaatttcaacaataatttgggaaagttggcatttaagaggagggtaattctgcaaatggcctttcataaaggatacaatagattgtagtttcgaatgattcacgtgaaatgttcacaatgtaatgttttcaatgttttatagatcataaataccagtagcaggcaagcatgtcatgcttatgcttttttgctatcgtgctcctgttccttgccactggtcttgatgaagccaagcattgtctctttgccttttaagttgtacataattgcaaaacggatacatgtaaaagaataaatcttattaaaagtaaggttgattttaaagtgggcaagaatgcatccatgatcttaagtaaataaaattcaagcgaatatgtggtttggattagagaatagtattatccagtgcacactaaattggagagattcccaacatgtggttccaaaactcaagagtacttaccaactatttcaattttaatctacgtgatctagctaatattttctatcagagaattacaactagttgatcttaagtacaaaactatactcaatatgcaaatctttacatccaaaaactgaatttaaataaggctctaaaatttgaaaaaaaagaagatagcaatgactacaaattgatcaacctgccaatacaatgataaaacatcagtgtattctaagcaacactaaacagtgatactacatgagcaaaaagattgaagtttgaaccacacatgatcaaggaaatgaaaataggcataccgccatgatctacaaatcagcaaaggagcaatcactatccagaatcccacaataaatccaattgccgcactgacaaacaaccaattcactccatgctcatcacttccttcataactatgagttttcccattggagctgcagtttatgggcagtggtggaccacatagattgttgccaataaagctggaggcatcaaaggtttgcaattgtgttcctgttggaatttttcccttcaaatgattataagacaagtctagcatgctcaaaaagctcgaatttgaaatggttggagggatttcaccagaaagttgattcctagaaaaatcaatggactgtaatgatcccatattaccaatgccttgtggaatatgaccaatcacttggttgtgggataagttcaaaaagttcaatccatttagacttgtgatttctctaggtatttctcctaataatttgttacttgacagatcaatgcttgttaccaaacccagaatgtttcggtactcatcttctcttcctttcagccatagtagcacaataactatactatatccggaagagtaatgtgtactattttgtgctacagaatagatacgaggatctgaactttggttcattagtgtcatggcactcaagttactgaaacaacttggtatattaccagacagattgttttgtgcaaggtctaaaacctgaagatgactcatctgacatatttcatttggaatgtgaccgacaaaactgtttgatcaaaggcggaggattttcatgtttaagagcttttctccaacccatgttggaatacttcctgaaagattattttccccaaggtccaaggatatcaattggttattcttcttcgaactggtaggaaatattcctgagcgtgtgttgttacgaatttgtaaagactgcagctcagacaaggaacccatggatgagggtaagttcccaacaaaatagttgctttgtaaattcacttccactagaaatggccaattcatccaacaatcaggtatttctccggagaaattatttgatgcaagattgagaatttctaattgcattggcttgtcctgattgttacataaaaaatcttgcatggattcagagaatgaattggttgaaaggtctaacccatacacatcatttgaaagatagggtaatttaccacataagtgatttgtgcttagatcaacagttgggatagatattgggttttttaatgtagtcacaagctcaccatgggtatgattatgagagtggtttaaatacaaaacctgagattgtgcttcccacatctgtgtaggaatagaatcaataatccctgtgttagacatgcctaaatatttaagttttttttgtgactgaatccacgatggaaagctgggacctaactgccatgatcccacatccaaataggtaagctgaaaactaggaagccaattggaaccaacttttaaagtgaaattgttccctgatgcatgaaactccttcaagcttgtaagatttgcaagatcatcttccttgacaactccttgaaaattattgccatcaatacgcagagatgacaatttagagagtgatccaatactttgaaatggatttccactgaatttattaatagacagatagagatatcttaatgatgaaagttttcaaaatgatcttggaagagcaccaccaattaagttgttggaaaaatctagcatgtcaatatttttaaaagcctcaatttgatctgtcagattgcctgaaagttgtgaactccgaactgcaagtgttgtgagtccatgggaaatacaaggagcaagaatttctaaaagttcattaacctgttggttgaatttgagatatgataaacctatctcccttaagttgcagagattagccaaagaagttggaatggttccttcaagtagattatatgacaaatcaagttcaacaagagaagtcaaatttcccagggcatcagaaatagtcccatgtaagttgttgtccattaggttcaggaacttgagacgatgaagaccgtataagcaatcaggtatagaagatgagaatgaattgaaagacaagtcaagattttgaagaagtgtgaggtttcgaataccaccaggaatcggaccttggatttcattaccccataattgaagagaaacaagtttattcaatttgagtatccacttggggacaaaagaaatggcaggggaataactagtacgggaaagatcgagaatttgcagagatgagaagttgagcaaggatggttcattatagtgagggagtgtgcagtgtgacaaatataggtgggtcaaagaaggaagagattggagagtgtgtagccaatgaaatgctttggataggtttgcatttcttaaacttcataagtgtctcacgctcacttgggatgcacacactctctctgcaaggtaacctaaacaaccaaagctccacaaacacaacaatataaataatggaggaggaattcatgttcatgcaacgcatatatgaaacaacttaattgtataagtgcttcttgcttctgcatattaaacttacttctttctattatttatactgccgcaactgcctttctttcttcattcttatttcttttttaattcacaaaatgatatttttcttatatatgaaaagggctagttttcatcgtcataatttgaaataggttgttgtgtcgtctattaatttctaattgtatttgaatctggaaattgttctctttttaatataaaaattaattagtgagatacaaagaagtgtgaaatataatgcttgtttaacttggtctaccataattacagagatcataattttttcttttataagtcttgcttcaaacttctccatgtatcgtagctattttattgttagactaataatgcgtatatagaatataccatagaagggtttgcatttaaaattttattccactaatggtggtggttgcagaatgcacagatatgtagaggtatatatgtctacaacgagccatttaggattaaaagtgtctaatcacaccaccattattttgcactagtttattttattttggtttaactacccttttagtcctgctagttgtgataatttttctttttagtccctatagttttaaacatttatgttagttcctatatttataatttttttaccttttggtcctgttagcccatattttttatgagctaaaatatgctctaaatatgcgttagatgtcgtctcaagtttcgaagcatgttacagagcaagagtctggtcaggacctgttcgaatcgaaaagagagaagagtcttttgaaagggattcccaggttcaaggaagtatttgcgaagtacaaggctaggacaggaaagagggcttcgaatcattgggcgattcgagttggtgtatggtcgagtcgaagtcaaggcagctagatttctggacttagcacaatttctgacttcacaaaatcagcttcgacttcgagcaatgtggataaccgttctaaggagcagatatgtgcatgtaagatgtacgtggcaggacacttggcattaggatagtattcgaccgttagggcagtttattttcgaatgtctatatatagcagtttttagttagatttcagggtcgcaaatcatttatacaaatccttatacactcaaagtatccagcgcagagagaaacgagtatacaaggagaatgtatgtttgtgaaccattttaagtttctgtaaactttacatttcgaatgcaatgcaatttacgtttcagtttataattcctgcttttttttaaatggttcattcgatcgaatgaactcgctgagcctttaaattctgcaatttccctttccttgtcaagttacttccagcatttcgatttctgttaagcaattttcctttctgcaaatttcgaaccagtgaacgtttgttgcaataatgaacattcaaagctttatatttaaacacaaacacacaaatgacatgctcctgagattcactagttgatctcgcaagcaattaacttagactagcggttgtttaccaaattccagtgtaaacaaattggcacgcccagtgggaccggtcaattgtgtgttttggttttaaattattaaagttttgttttgtgtagttggtttattgcattcttaattgttttgattttgtatgcatttaagaagtgggaaatctgttccacacttaacagaattcaaaactcgtacaaggatggctagaccacccccaagtaatcgaaacaatgaccttccaaatatggaggggcaaccaacgcagacatctgtcagtaatgccaatataaattctggcataggagccattcctgaccaaactgttggcacgataagttcgaccgcttcgacggttatgaatcagacaggggtaacttctcccatgaccaacatgacgttggcaagttcgaccacgtcagcgtctgcttttgccccatggaataaccctagtttagggaatcccagtggaagtccctttcgaccgcctcaaaaccctctatatggcatgcctacatctttgatggcagggttacaaaactctcaaccaaatatagagaatcttaatatgtcctctccatcaggatctgtagcgggcaatcaaggtagggtaattcctcaacatttaaccaatacatccgttttgtcactcagacaacaaatggatgaaagtaaccatgacatggttaacatgttaacacaacaaataggaactgttattaaccccttaattcaaaatacaaatgacagttaccaaatgttaacaaatcaaataagtcgaattgctgacttttttggggcaccacccatacagcaaccaccaattcgacagatccaaatacaggcgcctgtccaagagatacagatgcctaacaacccagggatgcaaatggctcaagcaccacaaccagtggcacgcatagagccaccagtccaacaggtcgaaccaaaccctggtatagtattggtaaatagaaaccaaaatgctgatgaagtaatagggaatattcaacaaaaccgtttcgataggcagaataaccttgcccaaatggtcgaaacgattttggtgcagaatggtttgaacttaggcttacacaggcctaattttgtgtctccattatctgagtatgtgttacagacagaattaccaaggggtgtgaaaatccctaagtttactaagtttgcaggagagacaaatgagtccactgtcgaacacattgctagatatttggtcgaggcaggggatttggctaataatgaaaatttaagaatgaaatttttccctagttccttgactaaaaatgcttttacatggtttacaacccttccgcctcattccatacataattggaaccaattggaaaggattttccatgagcaattttatatgggacagtctaagatcagccttaaagagttagccagcgttcgacgcaaggcacttgaatcaattgatgattatttgaacagattcagactcttaaaggcaaggtgtttcacccaagtccctgaacatgaattagtcgaaatggctgctggtggcctagactattcgattagaaagaaattagatacccagtatttaagggatatggctcaattggctgatagagttcgacaactcgaacgattgaaggccgaaaaggctagaaattctaaattccacaagaaggaaaaggttgcatatgtcgaaaccaatgacagtgaccaggagttcgatattatttatgaagatatcgaagacagtgaggttgatttagcagaattaaaacctggatctccttatgtttgtaaactccttagaccttccaatggaaaaaaccctgttgaacctaaaaatgataaatttgtgtctaaaacttatacatttgacataactaaatgtgatgaaatatttgatttattagtcacagatggccagattgttgttcctaagggcttgaaagtacccccaatcgaacaacagaagaaaaggggttattgtaaatttcataatttccttggccataaaacctcacgttgtgttcttttcagggatttggttcaaaaggctcttgacgaagggaggctcaaatttggtgagaagccaaaggttgttcaggctaatgctgaaacatccaaagctgctgaaactctctatgcggagccccaagaaataatgatggtcgaaacaatggaggtgtcccatgtgcaagttcaggacatatctgaagaggattacaacgaacaaatgaaggttgtgtatcctcaggctgaggaggagttaattgatttcttgaacagatgcaaactcgaaaacaagattgtgatgctctgccctcgctgcagtgcagtatgtgataaggaggctactgagggcctcaagaaataccaagttgttaacaagggggcaaagcagaaccaacgtttcgataaaggcaaaagagttatggggcagtcgaacactaatcagaagtctggtcgaaggaatactttctctcctcctggatcagttccggtcgaaaaatggatgcaccagggactcataaggttcaacaaaggggccatggaagtaggtggttcgagtggaatgaagcaaattggcccacaggaggccaataggtactcttataggaacaattacaaaggaaagaatcctatgacgaggacccagtggcgcaggttccagcgtcagaagaaattggtccaacagaatttgcaaacgggccagtataaagaagtatctaggaggccagtaaaggagagactcctgcctccagtggatgaagataagatggaggatgaggatctactggattctgaaccagactttgatgtcatttgtgtggtatctatcttgccatctgaatatgatgtccaatctgaagttactgagatcgaaagtgagttcgatcactttgatatggctgacccaaagccagtatgttactatgttatgaacaatggctgtgtggaagaacaattagcttatttcgaaaagccagattttcagatgaaaagtcatctcaaacctcttttcatcagggcaaaagttgagaatgttggaatcaacaaagagctcattgatggaggagcagctgtcaacttaatgcctcgatctatgctctacaagatcgggaaacatgacactgatctatctgcccacaacattgtgctttcgaattatgagggtaaaactggctattctttgggagccattcaagtagatgttgctgtaggcagtatagttcgaccaactcttttcctggtgatacagtctaaggctaattttaacttgctattaggaagggagtggattcatggagttggggctgtgccatctacccttcaccagaaactcgttatctggagggaggatgggattgttgaaaatatagaggcggatcaaagcttctataagtcagaggtcgatagtgttactgcacaaactttcgacaaaaagttggctaacatagcaccttgtggtgacaaggaggctgttgtcgaatcaagtgacaatgttatccactctgtcaaactccatcctacctatgggtttatatgggagagggaggaaattgatgctgttccctctgaagatggagtcattccaccaactgggtggaatatgtatgaagattaatatgactgaggccactacattggccagaattacggcttatatggccgaaaatagactaaatacggcctttgaggctgaatctcaacaaaatatggcagttgaagccaagatcgaagatcatgaaaataaagaaacaaaggatcgaagactggattgcatttatgacgatgagccgctgggtttcgagaaaaatcccgtaagtgaggtgccaaagatgcaggctcaagatcctttggaggaaattgacattggagatggctcgatgaaaaggccaacatatatcagtgccaatatcacctcaagtctaaaagaaaagttggtgcctcttcttagagaatttaaagactgttttgcttgggattaccacgaaatgcctgggttaagcagagaaatggtcgaaatgaaattaccgattaaggagggaaaaagaccagtaaaacaactaccaagaagattcgcaccagaaatcatgtccaaaatcaaggaagagatcgaaaggctgctgaggtgtaaattcatcagatctgccaggtatgtcgaatggttagcaaatatagtccctgtcattaaaaagaatggaactcttagagtatgcatagattttagggatttaaataatgctacacctaaagatgaatatgctatgccagtagcggaaatgttggtagattcggcagctggcttcgaatttttaagcatgttagatggttattctggttataaccaaatatttattgctgaaagtgatgtgtcgaaaacagcatttcgatgccctggtgctttaggcacttatgaatgggtggttatgccctttgggttgaaaaatgctggggccacttatcaaagggccatgaattctatgtttcatgattttattgacacatttatgcaaatttatattgatgatataatcatcaaatcctcctcagaagatagccatttggattaccttaggcaatctttcgaacgaatgaggaaacatggattaaaaatgaatccattaaagtgtgctttttgtgtgcgtgcaggagatttccttggttttgtggtgcataaaaaaggcattgagataaatcaaaataagacaaaggctattcttgaaacgaagcctccttctaccaaaaaacagcttcaatctttgctaggaaaaatcaacttcttgaggcgattcatttcgaatctaagtggcaaagctcaaattttttcgccattacttcgactcaagaaagatgaaccattcaaatggaatgaagagcatcaaaaggctttcgatgaaattaaagaatatctgatcaagcctcctgtgttaatgcctcctagtcgaaacaagactatgaagttgtatattgctgcgtctgacaagaccattggtagcatgttggctcaggaagatgatgatggcatagaacatgcaatttattatcttagtcgtgtactaaatgatgcagaaactagatatactgccatagaaaaactttgtctatgtctgtatttctcttgtgcaaaacttaagcaatatataaagcctgttgatgtttatgtgtattctcattatgatattattaagcacatgttgtcaaaacctattttacacagtagaattggaaaatgggctttagccttaacagaatattctttaacatacaagcctttgaaatctgttaagggtcaaattgtggctgattttattgtagatcactcactgatcgaaatgccgcaagactatgtcgatacagagccttggattttgtatttcgatggttcgaaacacaaacatggaactggaattggagttttaataatatcccccaataaagttccaactaaattcaaatataaaatcaaagggctttgttctaataatgaggctgagtatgaggctctaattacaggccttgaaattttaattagcctgggggcaagaaatgttaacataaggggtgattcagaattagtattgaagcaattaacacaagaatacaaatgtgttaatgaacacttagcaaaatattttgttatggccagttctcttctgaatcatttcgattacattaacattgagcatatacctcgacaagaaaaccaagaagcaaatgatttagcccaaatagcttcagggtacaaaatgtcgaaggaaaagttaactcaattgatcgaaataaaagataaactggtgttaccagagccattaagcactaaattgccaatgccaaaacttgtgggggcaagtataccacaaaataatgaagatggaagtatgaatgatctccaggaaaaaattcaaattttggccattgacaatatgttagataatgattggagaaagtccattatcgaatatttggaaaatccagtaggcaatgtggctcgaaagatcaaatatagggctttaaattacgtgattatgggaaatgatttgtttaaaaagactgcagaaggagtattgctgaaatgtctaagtgaatcagaagcatacttggcagtttcccatgttcacagtggggcttgtggatcacatcaagcaggccataaaatgaaatggcttttatttcgacaaggtttgtattggccttcgatgttaaaagactgcatagaatttgccaaaggctgtcaggaatgccaaaagcatgcagggatacagcatgtacctgctagtgagttacactccatactcaaaccttggcctttcagaggatgggctttggacctaattggtgaaatcaagcctgcttcttctaagaaccagcgttatattatagttggtatcgattactttacaaaatggatcgaagcagtccctttgccaaatgttgatcaggaagcagtaattagttttattcaaaatcatattatttataggtatggtattcctgaaacaattaccactgatcaaggttcagtttttactggacgaaagatgcaagaatttgcccaaaaaactggctttcgattattaacctcaacaccatattacgcgcaagcaaatggtcaggtcgaagcagccaataagattgtaattaacttgattaaaaaacacattgcccaaaagccaagaaattggaataaaacgttagatcaagttctatgggcatgtagaaattctcctaaggaatcaactaatactaccccatttcgactgacttatgggcatgatgctgtacttccggtcgaaatacatttgcaatcagccagggtacaaaaacaaatggacattccaatcaaccattattggaaaatgatgtcagatgagttagttgatttagatgaggagagattaagagcattagaagttttgactaaacaaaaagaaagagttgctaaagcttataataagaaagtgaagtcaaaaacttttaatgttggagatttagtttggaaggttatcctgcccatggatagtaaggatcgagccttgggcaaatggtccccaaattgggaaggaccgtttaaaataattcagatctattcgaatggtgcttatgaattagaggaattaacccctcagaaacgtactttgagtataaatggtaaatatttgaaaaaatataaaccaacattgctcgaagttaaaataagcatagaataggaagaaataatggaaacataaaaatggcgataacagtaaaattgccacgaaagggcatgtgtcaatattacatcaaaagtagaatcgaaatacagaattcaaaataaagaaatcataagttctactaagtcataaccaaatcctcatatagcttcttcaaggtggccatttctttagttaagacctggtcagcactctccatgactcttgcctcatctgctacagcttgagatgcgctaaaggccttcaggccttccctccctttttcagtaatcagtttctgaatcgagttatcggccttctcctggagttccttgcgtttggcctgctctgttacaattttctgccttagatcatcgacctgagacagcaaattcgtaatagttgcctcccaggaggaaatgttatcatcacaggctttgatctcaggagttccttctttcgcctctttggtgagacgttcgacttcatgttgagcagcttgggctttctcgagcagaaggatatgtgcctgtttctgggcatccagtctggcgtcattttcgcgttttttctgcacagtacttgcaaattgatcgataatggactcgatttggatgactttgcctagaatctcatcagaggtaagagggttgtgcaatttcttcaaaaagttcaggtgcccaaaagcagcagaggggttctcttcaatggatttaagtacgtctgcccgtgcgtattccattgataacttcaaaagcaggcaatcttggcgtactgaagaggttatgtcagcatcagatgaggacgaagcaccaggaatcttttcacttgaggtgttggcttgactggtgttcagcaggagtcgaagggctgcagctgggtcttcgtcttgcattttaatgaatgtatcttctgcgatccctatgctagcggaaagcttagatgttgaagacgccgggtaaatgtccgaacctccagcttcagcctcttgtatggcctcttcatcggagaagttttcttcagatgaacttttctgactcgatccatgaggactgctgggtcccatgccttgaccttcaccttgttcctcaacattcactgcatccgtctcaggagcgggagatgttcgagcatgtgagggtatttcttctacagaaacatgttgttgtacctgattcgaattatcatggaaaaaggttaacaaatagtttcgtataagctatgatttaaaacacattaagaggatgatacctcgacggcaggttgtgctggtggtgagtccgattgatcgacagggttgcccatctcagcaacagaaggagtagcctctacttcagtgccgtcaatattggtcgaaggtggttggacatcaacagtttgattgtcaccttgattttttgatggcctgatctttttctttttcttcttgattggctcaccaccctcaacagccacagaaggttcagactcgacctgcttcactttctttttcttcttaggcatttgagcctgagaattgcctgtttctgcttgttcagcagacttggtcgaagtcgaaggtaactttctttttcttatgagtggtctttcctcttcttcctgcattatgagggtaaagaattgtcagaatatagacttgaaagagagttataatattgacattagaaataaaacttgcatctttttcttcgtctaattcgatgaccacacgcttcgagcgttttgaggtcgtggtagtctcagtgctatcatctttcttttgactctgaaaaaataaagaaatatgaggcaaagacgttaagagtaaaagataagttcagaagagttaccttctcttcttgtttcccttcttggatcttcaccccagtgggtttcttgggtctcacatcagctcgagacgtttcggtgcttttctttgtcatgattgttttgcctaaagtaagaatattagaaaaggcaaaaatacatatcaatttagaaagtcaaaagtaatttaataccttgagcttgaaggtttgagcgaatattctcgaccgttggttgtgtaaaaccactctcgagtctggagatcatgatagtagtgtctccaattgaacgggtcgaataatatttctcccaccaggtaacaaaccccatggtgcagaagtgggaatggttgaactcaaaaggatgcaggttatagttttcatcaagagaaatcttcaaaaacttcttgaaagtcttttctgaaagattggcccctcttataacgtctcgaggatcttcgaacaagcttttaggacggatttgcgagaggccaaattgtctcgaaaccaaattaggctggtatccaaccaggcctaaatagttcgattgaacacctgtacggcaagacagaatctgtggattcaagtaaaatgaccatatttcgttcacttcttcttcattgtccggatcgacagcaggaaaatagtcagtgaaccaggccgggccaacttctcgactaatgaatggagcatgttggggaagaaacttgtcaaagctcagaaaaatcctcatgtactttaggaacagcttttgtgggttttgatcgaaggtcttgggtgttaatcgaagtgctctctggccttcgatcgagcgattcgcaacttcttcagcataatcttgtgggattattaatcccatttcttgttcgaaagtggcattaagccacaattggagaagccacataggcccggacactaagaaggaagacctatccttcgatttcttcagatcatcacatgcctcaccaagcgattcgtatagcactgctaacaagaggcgtccaaatccaaagttctgaccttcatgaatttgtaatgccattggaatgaatcttttggctacttgcaaggatttcgtgcaaaaaacatagtgagatagccacagggttaagaaggctacgtgctcttcatcagaaacctcctcttcgacgggtcctttgtgttcagctatatatttggaaaaggtattctccttatatactagcttgatattgtcactagaattagtggggtcataagtttctccgctaggcctaaggcctgtgagggcggctacatctaaaagagtaggggtcatcataccacatttaaattgaaaagtgttggtagaagactcgaaaaagtgcatagctgctatcagcatttctggtcgatattcaggaccaaatcgagagaattgtatcaagtcaaagatgccatatgtcttccagaaatcctcatacgcttgttcgactcgatcaagccaaggtaggtaatccttatgggctattgacggggcggatcgaaagagtttgtggggtttgcttaaacaattgaagttgtaaggctcactatcaaaaatcctaggttcgcaagttgggtagcagggaaataccttgttcattgaactcgaaagtgactcttggtctggcagaggtccaccgaaagcgtaaactgtcctttccactgcaaaagggatcatcacctctgattcccaggtttctgtttgttcggcgtcaccatgtggttctgggaccaccttctctccgtcattcctgactgtaaaacggtgccatttcccagcaaacggaactgcttgtccttgcgacattgtaaatctgagaagggatgattttctcgtgaaaggtttagtagctgatggaatcagtgagtaagagcttgggttcacgaagaacagtggcggagttcggaaatacggtgaggttgatgataaaaggaataacgagtatctggaaataggaaggtttcgccggaaataatggaagcaaggaagaagaagaagggtttcagaagcagagaagaagaaaggtttcggggtttcggaaacaaagaagctgaaggggtttctctgaggttttttggcgctatttatggagtttcattttttaaagggggaaaaaataatataataagaatcaagggtcagaaatcaatcacatcagatttccctttttactccccagcgtgacacgtgttccactctgcctagaaaggtggaattaatgatgggtagtgggaaatcgaggcgacggttactagtaaacgtgccatcgtgttgccgttccagggaaactgttagaagaagagaaaaaatgtcaacttctcatcttccttcgaaccattcgaatcgaagcagacattttttgggggcaatttgttagcccatatttttgatgagctaaaatatgctctaaatatgcgttagatgtcgtctcaagtttcgaagcatgttacagagcaagagtctggtcaggacctgttcgaatcgaaaagagagaagagtcttttgaaagggattcccaggttcaaggaagtatttgcgaagtacaaggctaggacaggaaagagggcttcgaatcattgggcgattcgagttggtgtatggtcgagtcgaagtcaaggcagctagatttctggacttagcacaatttctgacttcacaaaatcagcttcgacttcgagcaatgtggataaccgttctaaggagcagttatgtgcatgtaagatgtacgtggcaggacacttggcattaggatagtattcgaccgttagggcagtttattttcgaatgtctatatatagcagtttttagttagatttcagggtcgcaaatcatttatacaaatccttatacactcaaagtacccagcgcagagagaaacgagtatacaaggagaatgtatgtttgtgaaccattttaagtttctgtaaactttacatttcgaatgcaatgcaatttacgtttcagtttataattcctgcttttttttaaatggttcattcgatcgaatgaactcgctgagcctttaaattctgcaatttccctttccttgtcaagttacttccagcatttcgatttctgttaagcaattttcctttctgcaaatttcgaaccagtgaacgtttgttgcaataatgaacattcaaagttttatatttaaacacaaacacacaaatgacatgctcctgagattcactagttgatctcgcaagcaattaacttagactagcggttgtttaccaaattccagtgtaaacaggtcctcaccaggaagtttcaactcacacataaacatgaacaaaattaataaaaatagggaagcaagctcaggcacaactgaactgcaatggaggtatgggacaaagccactacacattccattattcttgagtctgccaccgacccctgcaagcttagcatttgccaattgccatgatgtaatctccttcttcattgtctctcatcaagttggagtggtatcatagcattgaactaagttgatcgttctaatggtagtttgtgccttcatggttgggatgatgttgcaggttccggtttgttgttgagggaaaagatgatcagccacgtctcgtgtgtgcataagagagtgtctttgccctctccacaaccttagtttcaacaattgtcgttaatcaaaacttgatagtgagaatcaaaagagtaaaaaaaaaaatgtgtttaattcataatatatattcgaccatttgatctttgacaaattttttcttcaaagaaaatctttaatatttaaaaaattttattttaaatctccatcgttaaataatgacgtaccttcaatatttatttgaaatttgtcttccaccccgtctccctcaagctctccacattcacacacatatgaacactaagctctagacaaaaataaataaataaataaccacgagaaataatatataactctttagtggaataaataaataaacactaagctctccacattcacacacatgaaatgatccagactaagttaacaaactaaatggtcttcttccgtgagttcacaatgaaaccacagaatttattttcatccactagtttccttcccaaatgttttctaaaacataacacactacagaaccttctaataattttaaaaaaaaaaaaaaaaaaaaacccaacattttacatgtagcaccacaacttaacaatttctagctacaaccctgctctgtatactcattctaaacttgttccatagactataatataatctatctcctctcattccttcatcaagattgaaaaatggattcaaatgcttgtctaccacacttgctagtgttagcaataacattggtattggttagtcatgcaatgggagattcagctcaagacaaacagagatgtgcagaatccctaacaggtgttacaacgtgtctgccatatttgggtggtgacacgaaagcacccacagcagattgttgcagtggtctcacacaagccatgaagaccaacaagaagtgtgtctgcgttattctcaaagacagggatgatcctgatcttggcttaaagattaacatgacaattgctgctggtctcccttctctttgcaaaacacctgataatttctcagtgttctggtatgttcaatttcaaattaagtcttcctttttttcttaaagaacactacactacagtgttatgtttccatttcctatgcaacgaatgatctataagtcttgttagtggtggccatataaaaacttatgtttttatctttcattgtttgatgataacctgtttttaataggaaaaaaaaagtctttatttctattttcaaaaactatttttagttttcaagatacaactaaacaagttcttcagactgtttggtggagaatgatgtgagacacagaatgtggaattgagagggaacttgaacaagattaaaacagaagaagcagagaaaacgttttcccgatgtttttgtttttttggattttagaacacttattttggatacgattctccaaacttatatattttggaagagaaattgattactaagtagtctaaaattattttataaaacagtttcttaactgagaatactcagaccctaaatcttccaattttagtatatttctaaaaaaaaaatcagaatatttgtggtctaagttttatcattatcaagcctttcattttccttaaagaacaaaagagtgtcacattccatttactatgtaatgaatggtcaacaagtcatgtacttcaaacttttctacttttctcattcgtaactggacaataacacattttaaaggggaaaacaagggcatctaaatctgccaattttactttgtttgtgtatctgttatctctgagttttcaactccgaagttaaaaatatttgaggtttgattttttctcaagaaattcttgttttaaattatttgatcagcacttctgcacttggatcctaaatcacctgaagctcaagcttttaatcaaattgatcagaaatccaatggtggttctatccgtccttcgcccactccttctggtagtgatcctttcaacaaaatatttcatttttggaatttatttttgacattgacttttgagtttcaatggtgtagtactaaattttgcatttatttttaatgtgttcttttgtgcattcagttgaaggaagttcccagaatggtagaaagcaggggacagatgaaacggccacagctaagaatagtgcatcttatatcaggaagagattgttagaaagtttggttgcagttgcagggcttctaatttggctttcatgagcttaactcaaatattacctatatattaccattttcatatcacgttgaaatgtaaaccattgatgagttgatagtgtaaaaaatatttacactcttgagtgtattaaatctctgacagactcacaaaagacattattgcaaaaccttattggagatttatttttgtgagcactttgcctttaatctcatacaactatatgcttgttaaacaaatcttattgtacgttcagtcctaaaagtcttttatctctaataagtaataacgacttgttgtaatagaaattaaaatcttattattatttttttaattacacttgaggatgattttggtatcccacttttcaattgctcggttcgttcccatattttcaaattttacaaatttgattcattagttaacttgatatccaatctttgatggagatgtttatgaggctatatgtgaaaatagagtgttggcatggatctcaacttttaattcctcaattttggttgccatatttttaaaattatgcgattttggagcaggagtgttgtttttcaaatataccaatactactcagggattatgcatgtggggatcttcttacatatatactactatgaattatgttgtctgcttaaagttgtagcagaaaaatacaggtaattttgaaggaggccaaatgcatttcagaagagaataatagagataatgtggaacatttaccttgtagcatttccatttttaaaaataataagtttctaacattacaaagttaacaaactaatttttttttcctcgtaaagtctaaaactgataattcgtcaagcatgatatggtttctttagccaagtacaagataatctagattctacttgtatcctcccaagatattctaagaatgaataagttaagttgaatatggaaaaacaaatattcattaagatgttatggtttgattatcccaacaacttttctcccatgattcaacttgttgaattgagctttcctttctctataatgttgcatacaaagttggagggtcaaaaggggcaggcatggtgcaagggtcggtatttgcaggaaccttgaccaatgattccatcataaatttctttactgatccttctgctccacaaaccattgactccacacatagttctgtagcattagcacttatggagggtttgtatctgaagagtttagcatatgaattcaggagatgaaaaatgtagtcgtacacgtagtccatctttacctcttcttgaatgaaatcactggccatgcaccttgccaatttgatgtgcctgataaatttcacaaatagaaatgaaatggaacaagttaaacattgagaaagtgttgtttaatttatttatttcctccaaaaagttttgcattagtaggcaattcttgtttattattcgtataagctcacattttagtatatagtatatctgcatatggattgtgcaataatgtaaaggatgaaacatgttaggcttttgggccaaggttattatattaaatcttaaaaggtactatatattaaacattgatttgcttataactatgtagtcaggtttgaccctgattaatattaagtgattcaccattaaatcaaatattccgaggcctcggtgaattcttttaggattaattaacttggtaagaattatattctagccttagtgaagaagcaaaacttcaagattaccctttgcttgtgattattgccccaatccacagcaaacttaatggatctgcacttgttatcgtcattaattggaatggttgttgtatcaaattttcaatattcaaactaaaaataatgtaaaagaaaattgtcttctaaaccatagcgcacaccatcaagtccatctcaaggtttttcagtttttcatcttgaacctttggacactccacaaagtccagccatgttaaggtcggacttcttcaacttgaaccataggtcactgcattaccttcctatcaacttccctgtcattgacaacaaatgttgcgcaaggaaaaaaaatataattgatgaataaattaattatagaaaaagggtgtactttaaagactatttcgattaaaaaatctgtataaaaaaagattatttagttccaatctagctatttaattttgatcaatttttcaattcacaaaataatattctcttatatatgaaaaaaaaagactagatttaattgtcatcaattggaaaggttgttgtgtcatgaatttctatttgtattcgaacttgaatattattttctttatcatataaaaattaattagctatataaaaagaagtgtgaaaaagaatattaacttttttttctcaaaaaaaaaatcagtatcatatttcgtattttttacaagttatcaacttaaataagtggagaaacataattttaatttccattttactttttatataattgcaagtgcaaaatttaaacaatcataaaaatactcaggatcaatataatattctcgaaaaacaaattcttacgataacttaaacaatctacaaagcagtacaatttatccttgtgccaaatactaaaataagaaacatttttttattttagtttaccgtatagaattgcttaaatcaatgaaaattttattttaagaaaatattaatgatttttttaaaactttgagtaggttacatcaaaggtaattaaatttagcttaattagtcttcaaattttaactattatttaaatcagtcattttgttacacctgtgttaagtaaataacaaaaagtcttcattataaaattcaaatattctattacttgcaatttgaacccataattaattttaaactatcaaatgtttattattcaaagtaaaagaaatgaaaacagacaaaccacggtcactccaccaaaccaaatccataccaaggtccccgctttttcaacttgaaccataggccactccatcaaatctatgtcaaagtttcttatcattgacaacaaatgttgagagttaagtcaagcatgaaaaaataggctaaaatatatcatttctatccctataaaattttaatatgctacttttttatcgtaagttaagtttgaatgattgataattatcatgtattcttagattttggtgtcattttgggatattatgtaatatatgtcttttatgtttttttattgacataaactaatcttcttttctgctggactttaatgtaattggttcttttttcatgtaatgactattttttattcaataaagcattgtaattgtttctcttctatgtctaatatgtgtttttggcttgatcacctgatttttttatcaattgtaattgaaaaattcctttgagctacgaattgaaagaacacctaataatttttatgtctaggaataagataaaaagaattgagcatcaataaacactttatcttaacgcacatcatttggttatattaattcaagggattgatagtgtaatcaagggatttaggtctttttcacttaaggaattaaagttaatatggtaggtttatgataatataacctttattaaatatgaatgtgtagtgattacgtgatagaaacttcaatgaaattaaaccccaatgattttttcattgatttcatctcaatttactttgcatacactgggtgtttgttaaattataatgtctgggtgtttaaaactgccaaaataaaaaaataaaagaataaaatccaagatttcttgaaaatcattactatcggcttaagaaagaaaattgtttcttgtgacaccctttatcctgacatacatataaaaatataaaatttaattaaatcaattttattcacatcacataaacaaatccacacgagtaaaaaggttcacattcatttcacgattactaaataaaacataccagaaacatttcaagctaaaaaaatcatgcaattaaaacaaaaacgcatgtccaatgtcacatcctatcagagcattgtttcttgtcgtgctccatcataaagttcctaaaagtaatctacctagtcatctgttcccacgaatacaagattcgaaatcatcacaggattcaaacacaaacagccacagggagtgagttatctcattcctaaacagatagggataaacaaaatcatatctatttaatataagtataataagttcaacttaatataatctatgtcacttcaccactttatcatttaaaattcatttttcaatcataaatcacattacacatgaatcacacgcttgaatcaagaggtgataatactcaccaatttcataataaataattcacatgtgttatgtaacaattatttcaaatatagaaaaatagtctaatttaaagactatttcagtcaaaaaatctatataaaaaatattatttcgttcaaatctagcaatttaattttgatcaattttttaactcaaaaaataatatcctcttatatatgaaaaaaagactagatttaattgtcattaattggaatgattgttgtgtcatctatttctaattgtatttgaacctgaatattattttctttatcatataaaaattaattagtgatataaaataaagtgtgaaaaataatattaacttttttctcaaaaaaaattgtagcatattttgtatttcttttacaagtcttcaacttaaataaaaggagaaacataattttaatttccattttactttttaaataattttaattgacaaatttaagcaatcacaaaagtactcaagttcaatataatattctcaaaaaaatattcataagataacttaaataatctaccaagaaatacaatttattcttgtgccaaatactaaaataagaagaaaaaaattattttagttcactgtatataatttcttaaatcaatgaaaattttattttaagaaaatattaatattgtttaatactttgtgtagtttacattaaaggtaattaaatttggctcaattagtcttcaaattttaactattatttaaatcaatcctttcgttacacctgtcttaagtaaataacaaaaagtcttgcattattaatttcaaacattatattacatgcaatttgaatccataatgaattttaaattatcaaatttttattattcaaaataaaagaaatgaaaacaaaattgtctcctagacaaacggctggctactccaccaaatccatatcaaggtcgtcactttttcaacttgaaccataggctactccatcacgtccatctctaggtcctccattttttcatcttgaaccttaggacactacacaaagttccgccaaaggtgtttgacttttgcaacttgatccatagcccataggccactccaccaagttcatgtcaatgtccccccacttcttcaacttgaaccataggtcactacattaccttcatatcaagttccttatcattgacagcaaatgtttagtgttatgtcaagcaaggaaaaaactataaatgatgaatacatcaattataggaaaaggatctatttaaaagactatttcggttaaaaaaaacctataaaaaaactatttggttccaatctaactatttaactttggtccatttttaattcccaaaacaatattattcttatacgtgaaaaaaagactagttttcattgttatcaattggaaaggttgttgggccatctatttctaattgtattttaacatgtacattattttctttttcattaaaaattaattagcgagatacaaagaagggtaaatcgcttgtttaacttggtctatcataattattgagatcataatttttccttttataactgttgatcctaatttctccgtgtatagtggatcatatttaacttaaaaagtaaattagaagatctacaaagaagtgtggcatgtttttcaaattatttatttatggtcctagctatttattgttagaccacaaagtcttcaattattaaagtttttgtctaaatttcatttacttatgtggtgatagtttaagaatagtgacagaagagaaaaaaaaatatattggtatttttttaaaaaagattggtgtttctagtagaattaaatcaattaatacattgaattcaatgcattgaattctggtttgacttttaattaaaaaaaaacagcatataaatgtttttaaaactgttgtgtggtttccttggaaaaaaaactattgtggttctattatagttgactgaatatttgagtttgaaaagattatttttatgaaattaaaattaaagattaaaaaaaatataaaattttaattgcattctttattattcaggtacagatattgtgtgattttggtctattgagttccaattgcgagaattggattggatccactaggcattgcaatttcaatccctccatccatctttctttgaatatttaacagatatttactggcatgacactagatgaaaggtagataatatgacaactaccatgttgcctaacacatactgaactacacttttgatcccttagaatattgcaatcataaggaagcaaaagtgaataagccacatctaagggaccaaacttacaaaattatgatacccaatttacctaattagaactcgggaacccaaattgtacaattcaaatgcatggagatcaaaagtgaaattaaactaaatataaattatgagagtattctaaatctgtcttcattgtctgaggagcaaaaggacttgacaagtgttttgtattttttttttctacatgcatatatagtgtatatatatgctattctttttctattttttcctacatttatgatctcggaactgaaacagtgagagaaacagatgtgaaaatagatagggtggataaagaacttgacatcggccactggaagaaaatgaacagatgaaaaacatgcagaatatgggtcatgacaaccatctttttgggtatttcactatttctttaataaagataccagctctctctctctctctctctctctctctctaatacacacactggtgacacaggtgtgatggaaaccctatatctgatagcttgaaactttattttgtatgacggaattcaatacaactaatgaccctagtataaaatgataggaactattataaataaaaaagtaatagcccatgatttttaaaaattaaacaatcatgatttgtcaaatgaacgtgttaatgagtattatagaaaaaatgcataatactcctcaggaaatgggaatgtggaatgtatcagagtaaggaaaagcgagagaaggaagatgtggaagggtttagaaactgcagaatcctatgcaagctccaactttctacactaattaaattcattcaggcaaattctaagttacatgttgtgtaaaacaatcttcttgagtgtgtcatttcaggtattttaatgctaatcattgttagtgcatagatagtagaagacaataatgcgtcataaatacaaaacagaatttgatactcaagtctcaagctcgtctagttctcttaacatcaagaacatttaataccaatgaaagcaaaacagacagaacaccccatatgaacaggtacatagtatggtaaaccttttcacatttttaatggctagactaacacgttgtaatgtctctcactcctaacagttaacaggtaaactcataatttcccaagtaaccttcttaccttcaaaactattatcacataaatcagatctctcaagtggtcaagataatgaaaataagaacgcctccaagttctgttgaagaaaacaacactgcaaaaaccccaaaatcctgctgcaaatccaactcccataccaatataaaactctgatgttccaaagaaattatcatcaccgtgtccaacagaagcactctctgtcaactcttccttgtctgtgcaattttttgttacaggaggaccagaaagctcaggatttccagtgtagctaagttcttcaaagctctgaagttgggtgctcgtgggaattctgcctgataagttgttgtatgatagattcaggaaactgaggaaggacaaatcagataagctttgagggatttgacctgaaatgttgtttagtgagagatcaagggattctaacaatttcatttttcccatgtcatttggtatctctccagacagatgatttctagacaagttcaaaaaccgcaaagcagatagcttggaaatttcagatggaattgctccagacagcttattacttgaaagatcaatcattctcaccaatatcagattgtctctgtactctaactcatctcctttgggaactaagacaagagtttccttgtagtgattataactgaagtcagagccatatgaataacttaaagggttggcaaagaagtcatcttcaccagccattgtcttcatgtcatccaaacaatttggaatggatcctgacaggctattattgccaagatccagcactataagggaagaaagttgacacatcttttcagtaatgctgccattgaaattgttggatcttagacgaagaaccattagatattgcatttcccacatccaatctggtattgtgtcagaaagttggttattgcccatgtcaatgaatttcattgtagagcaattttgcagtgttgaaggaacatatcaagagaagcggttgtcgtctaacaacaaagactcaagttgagacagataccccatggagtttggaatttcaccagacaaattgttactacccaagttcaaatgcaccaaagcctgccaatgcacccaacagtgaccaagctcaccagacaagacattatttgaaaaatcaagcacacttaacttattagtagcattttcctttccacataaaaagggagaaattgttccggaaattgagttattggcaacattcagcacttcaacatttgcagacacacttggcaatctacccttgaacaaattagaactcaaatttatgacgctggaatttagaaagatgttagataggtctccacttaacagattgtttgacagatccaggaattcaatttgcaaagtccaattccaaaaccaacttggaaccaagtctgcaatacctgccttagacattgtcaaaacctttacagaactttgcctttttagccattctggaaacataggacctattccaaaggagctcagtaaaacatattcaagctgaaaaggaggaacccatccagagttgacactgaggaacaagtttgtccaagacaaacgtagttcctttaatttcaaaagttttacaaaatttgactcttttatagatccttctaacaaattagatgaaaggtctaacatcactaaatttgagagagttccaagagttacaggcatatcaccagtcaaagaattagctccaagatttaatacctgcaggtttttgaggaactcaaaactcttaggaatggttccattcagtcggttgtgagccaggtttaaagttctcaaggatgacaagtttgcaaatggtgagggaattggacatgtaaaggtattattacttagatctagaacttgaagatgcttaagttggcctaatgaatctggaagtggcccactgagttggttgttatgcaggtctagattttttatgttctgaaggcttgatattatttgtggaatttctccctgtaaaaggttactgtgtaaattaagttggacaagggttgtgctgagattaaatagccataaagggatttgctgattgagattgttatttgaaagatcaaggacttggagatgtgtgaagttggattttccttttggtggtcctaagtaattaatttgacagctctccaagtgtaattctgaaagagatggaagtgaactcagttcttgaagccagttaccttgtttatgaaggtctgagccactcaaatcaaggtactccaaggaagagagccttgatagccaattaaggttatctatctgaagagcataattgtatccaagattaaggtgctgcaggtttgagaggtttcctagttgatgagggattaatcccatgaacccacttaagctaaggtccaagtatctcagactctccattgagcctaggaagcttggtattggagtaagaacaaaataatttgaactcaagttcaaccgattcaaatattttagttcaagcaaagaaggactaatctctccactcaactccctatagggagagcccacaggtgtgtcaagattgatttccatgacttgaccagtgttgttgcagtgaatccctggccatgtgcagcaatcagatttgtcagaccacgatgaaagcctgtttgaagggtctgctagtccatgcttgaagctgaggagtgcatttctttccttctcactgcaagtcatattgagccttgctgccttgcttgcactgaagtggagagttgttgcagtggacaatatcaagagaagaacatgagttgcaaatagcactgccatgaagaagaaggaagacgaaaaaggttgaatccacaattttctggttcacggttggtatttactactaacaatgcctatataggatatataccatagaagggtttgcatttaaaattttattccactaatggtggtggttgcaaaatgcacacatatgtagaggtatatatgtctacaacgagacatttaggattaaaagtgtctaaccacaccaccattattttgcactagtttattttattttgatttaactactctttttagtccttatagttgtgataatttttttttagtccctatagtttaagacattcattttggttcctatatttataatttttttaccttttggaccttgcgggaaagattgctgcagataaagtgtgattgtgagtttctggtcccatgagtaacagaggtgaggtagtttgtgccttcatagttgggatgatgttgcaggtgccggtttgttgttgagggaaaagatgatcagccacgtctcgtgtgtgcataggagagtgtctttgccctctccacaacattagtttcaacaattgacgttagtcgaaacttgatggtgataattaaaccttttatttttttattactttttttaacaacgggttatatatatgtagcagtttattctaaacaatggactacgtgtgaaatctttgaattctatgtaagaaatgttatttcaaacttctcatcagtcttcatgtcaatgatgatatgctccagtttcaaccctttgaattctatgtctaattaagctctcggtcttccgtttttgcaactttatttcgtagaaagaagccaaatttgaagatacaacatttgatactataactgtttggtgttttgaaaatctcactcacatatttccaaatgttacaaaagaatttgattcagtggttattacgaattccttcctagccttttttaccaagtcaaggaatttgcattgttgtgcatgatggctgccacaaggacccttgtaccaacccattagtgcaagtggttttttcttatgacaattgagaaacaacttatgtggtttataaagggaattctattttgtccaaaaatttccactcactttttgtgagtggtgtgaatgtcatgcagacaaatgatgtccaagctcaactttttccattaattgcaagttgtaagcagaatgtagaatgtgcgtataataaaataatgagaatggcaactgctagtactacttaattagaacaaaagtatcaaaattaaaacgaaaataactttgatgctgttaatatatgagtttaattttgatagatagtgtaaaaatttaaattgttaattaattagaaatcaccaaatgatttgtaaaacaattactaaaaaaattataggaaatatatataattaattaaatgcaaatgaaagtgtatttaaattaaattcttaattgacatatccttattgtgattttttgtatattttttatttaattgagacaatggaatgagaccgcactataaatgtcagcacgggtgtggttgtctaatataatagggatggttggtgaggaattttggaatgttagttggttttagaccgcacttaattatttaagccttttatgtttttaaataataattttatgtttgatttttaacacttattttttatccctaataaattaataatctttttttcataataaatatttttcatttattattaatacagactaaaataaaactcactaatttattaggaaataaatatgattttttaaaataaaatatcaagaataaaaaataaaagtgctaatttattagaaattcattatgaaataaaaatttattagaaaacaaataaaagattaagtatttattacagataaaaacatatttaatttgatttagtatttaacattgttttcgtctatctgtattataatttttttttatagttgtttcatttcaaatttgtgacaacattttcattgggacccttcatcagcaaattggacactaaagagactcattcaggaacaaataactactaggggtacaataaaatgagaggatttaacacttttgtattcggaaaatgtactttaacaaaataaaattatgtgtttatgcttgatatatatttaacttttgtgtttgatgtttgacaatatttttctttaaataaaatctctaatatttaaaaatattattttaaatctctataattagtttaataatatataactctttagtggacaattggcgttgtacaaaattgaaatgatccagactaaagtcaacaaactggtcttcttcagtgagttcacaatgaaaccacagaatttattttcatccactagtttccttcccaactaccatgttttctaaaacataacacactacagaaccttctaataaaaaattttaaacaaaaaaaccaacattttacatgtagcaccacaacttaacaatttctacctacaaccctgctctgtatactcattttaaacttgttccatagactataatataatctatctccactcattctttcatcaagagtgaaaaatggattcaaatgcttgtctaccacacttgctagtgttagcagtaacattggtattggttagttatgcaatgggagattcagctcaagacaaacagagatgtgcagaatccctggcaggtgcagcaacgtgtctgccatatttgggtggtgacacgaaagcacccacagcagattgttgcagtcgtctcacacaagctatgaagaccaacaagaagtgtgtctgccttattctcaaagacagggatgatcctgatcttggcttaaagattaacatgacaattgctgttggtctcccttctctttgcaaaacacctgataatctctcacagtgttctggtatgttcaatttcaaattaagtcttccttttttcttaaagaacactacactacagtgttatgtttccatttcctatgcaatgaatgatctataagtcttgttagtgaccatatatcaacttatgtttttatctttcattgtttgatgataacattatcaagcctttcattttccttaaagagcaaaagagtttacattccatttactatgtaatgaatggccaacaagtcatttacttcaaacttttctaattttctcattcataactagacaataacacattttaaaggggggaaaaagggcatctaaatctgccaattttactttgtgtatctgttatctctgagttttcaactgcgaaagttaaaaatatttgaggtttgatttttcctcaagaaattcttgtttgaaatgatttgaacagcacttctgcacttggatcctaaatcacctgaagctcaagcttttaatcaaattggtcagaaatccaatggtggttctatcagtccttcgcccactccttctggtagtgatcctttcaacaaaatatttcatttttggaatttatttttgacattgacttttgagtttcaatggtgtagtactaaattttacatttatttttaatgtgttcttttgtgcattcagttgaaggaagttcccagaatggtagaaaccaggggacagatgaaacggccacagctaagaatagtgcatcttatatcgggaagagattgttagaaagtttggttgcagttgcagggcttctaatttggctttcatgagcattactcaaatactacctatatattaccattttcatatcacgttgaaatgtaaaccattgatgagttgatagtgcaaaaatatttacactcttgagtgtattaaatctctgacagactcacaatagatattattgcaaaaccttattggagatttatttttgtcagcatttttaatctcatacaactatatgcttgttacacaaatcttattgttcagtcctaaaagtcttttatctctaataagaaataacgacttgttgtaatagaaattaaaatcttattatttttttaagtacacttgaggatgattatggtatcccacttttcaattgctcggttcgtttccatattttcaaattttacaaatttgattcattagttaacttgatatccaatctttgatggagttgtttatgaggatatatgtgaaaatagagtgttggcatggatctcaacttttaattcctcaattttggttgccatatttttaaaattatgcgattttggagtaggagtgttgtttttcaaatataccaatactactcagggattatgcatgggaatcgtcttacatatatactactatgaattatgttgtctgcttaaagttgtagcagaaaaatacaggtaattttgaaggaggcgaaatgcatttcagaagagaataatagagataatgtggaacatttaccttgtaacatttccattttgaaaaataataattttataacattacaaaattaacaaactatttttttctctcgtaaagtctaaaactcataattcgtcaagcatgatatggtttctttagccaagtacaagataatctagattctacttgtatcctcccaagatattctaagaatgaatgagttaagttgaatatggaaaaaaatagtattcattaagatgttatggtttgatatcccaataacttttttcccatgattcaacttgttgaattgagctttcctttctctgtaatgttgcatacaaagttggaggatcaaaaggggccggcatggtgcaagggtcagtatttgcaggaaccttgaccaatgattccatcatgaatttctttactgatccttcagcttcacaaaccattgactccacacatagttctgtagcattggcacttttggagggtttgtatctgaagagtttagcatatgaattcaggagatgaaacatgtagtcgtacacgtagtccatctttacctcttcttggatgaaatcactcgccaccttgccaatttgatgtgcctgataaatttcacaaatagaaatgaaatggaacaagttaaacattgagaaagtgttgtttaatttatttatttcctccaaaaagttttgcattagtaggtaattcttgtttattattcatataagctcacattttagtatatagtatatctcatatggattgtgcaataatgtaaaggatgaaacatgttaactgtgggaaattccacattggatagaaatggaaagattgaataccattttagtaaggagaagacacataaacttgagctttaaagttttgagttaaaatgtggtgtcattaagacctgtagtccaccctaattaatattaagtgattcaccattaaatcaaatattccaaggtgaattcttttaggattaattaacttggtaagaattatattctagccttattgaagaagcaaaacttcaagattaccctttgcttgtgattattgccccaatccacagcaaacttaatggatctgcacttgtcatcgtcctttatgggccaatagtggtgcactggaatcagtcctcttgtgaaaaaatcatagtatttaggttttacaagtagagtggtagagtcacatgacagaatgtatttttgactgactgaccaagcagaaccttcaatgtacaccttatatctgcacgatcatgattgaattgaaacattatttattgataaactgaacatatatatccaataacaaaaatatattattacatataattataactgaagcatgaatggacagtttaatttgaatgttatacctataagtgcattgacttggcaagtctgatttgttgaacccctcttgtgattctcgaaaccaatcctggaacagaattttcatttgtcaagaaggaagctatatgtgtggctttattgtgtgagtcaattaacagacaaaatatattgtccagacggaaaaattcagtaatgttcaataacaggttatttcctttgattttgaatgtacttttaagttgtgttttaataaaagattaaaagttaaaaaagtgtataatgttatatacaatattgctactggccattgtgttgcttgaatttgcctgttatttctagtttatgcacaccatgtgcataagccaattttatataatgaaacttttgcttataagaaatattacatacaaaattaattttttcatatccaaataataaaactactttcaataagtgtaatcaaacaaagctaataagaagtgtgatacctgggcaaataaacgagcattccaatcttgattttcagaaacattgcatttaatgaggtcttgtctggtttcagcaacagctggattacctttccagtaagcataaggctctctgttcagccatggtatcctcgtagtgccttctttcaactctcccaacaaaatatgccatggctttatattaatctctgccctgtgcagcacacatgcaatactttttacttgtttaaaaagtaaggtcccgttagggctgattgtgaattttcaattttccgttttaaaatataatttcaaaatacaaacatgctcaacaaaaattgcactaagttaactttttacattatggattatctaattcaaaatttacaagatgaataggcagatatattattgaagtgtaggaagaagaaaaaaggagtgaagttggcttagtacgtagcttaccatccccagaaggaccaatcagggaagacaatgtccaaggtagcatcatttccacaatagcgaaacaagggcggtggttgctcaacattagggccattgtaacgatcagccaaaaccacaggccaatcctcacaatcaaacataagctccaaatcaggtatcttgccagggtaccttctcaacaattgtagaatcccccatatgctaaaaacatcccttgtttgatagggccttgagtaagtctccaaataagccctaccctttaatattatcaacctaaaataattcgcacaagttataaagttgatttgatgataaaaaaaaaacacagatgggtttgaatcttttttttttctctaacaaaaactaataattaatattgaccgataaaaaaaaaacctaaaatttgccgtttgctttgccctctccaccatgtcttgcgtgatgcccgtgcgggcccatggcctcaaatcctcgtggatccaacggaagtaatctggacacgtggcggtggctggactgttctgatggtcttgtaggtttgtggggcatgttccggtgaggttgtatgcggtgcagttcaacggtgctattggcttccggatggagactgtgaaaggactcgtgccatatggcgtggtgctttgtgctgatttggaagatgatgcaccggaaaacatacgctacatgtacaccacgtgtcacacaatggccacaaatattcaaacaaaccatatatgcatcatcaaataaaaacaacacccacgtagctccagagtttaactagaaaaacgtatatacactgctgtaatttgcatgggaacgtaagctttgaaatggttaaaattaagaagctagagacaagtgagaataaaacaagagtgccgttaaaatagcattatttaatgaataatgtaagggtacaacagtgacaaaattatgggtccaagataattctacgtgcatgaaactacaaggctcacgatcccataaagtcaagaattcgttggtcccttctttgggatgtgtgtaaagtttgaaggacatgtgatttacaaagacttcttacaactcacaacctttggaatttctctatgcctggttaacccacaatttctggcgcctgttgcggttaggaacataggctagcaaaaacactaatcatttcaagagaaatgttaacacacttttctaatatattattttttattttaaaatttattaaaataaaaaaattcagctgatctcatattttatttagcaagtttttctcatatattaagtcttaggtttttaaaattataaagctaaaactaaaatgttttacagaatgtattttaaagtaaattttatacacaaaaatattatgattttgtaaaaatattacttcaaataaaaagtcttataatttaatactaattcccaactatataaaaaatttaaaatgtaatgtcgaatcttgcctgactcgtccgacaatatataaaaaaattgaatccttattcaattgtcttcaagttttagtcaaattgtttggtcaagggagagatattgagccctcctaactataagctaccctgagggtttctatcttttttttttccacttaattttttactttggcagcaagggttaaacctaccacatctacatgaccatgtcttactttccaataagttacacctaaatagctaacatattcctcttgctcacgcacactatctttcgtaaacttttcacgttcatctttatattatcaattcatttaattaatatacaattatcttaatattttaagcaaatctctgtataatcatctagtgtttctaaattgaatgagcctaaaccacacactcctaaaaaatggagtcatattgtcaaaatatccgtaaaaagataaaaataccaagttatgagcaagattttgatatactataaccttaacaccaccttattggaatttcatccaattttttacaataaacctgaatgtctaaatatcataactctgaatatatttgtcggtagcaacttactgcgtaccactttaacatgcgaataattaatgggtaaaagagtaagtaagaaacgtttttaccggccacacgaatatagtgggctaagcgacgaaatgacaatgtgttaattttgtcgtgtcctcaactatgcatgcctcaggccaagggaattcacacaccattcctaacaatttctaagcaattccacaacgtgtctatgcttcagacaacagtaacgtacgaaataaacaagtagcatctaataatgttaaaataagcgcacacattgagccaaccaacgttggaggtagaagaacaacaataatatcaataataacaaacaatactcacatgtgtgtcgagcgtgcgcgtgtaagcaaacgcgccgatgatgagcatgacgggaaagaggagaaccgccgtggatcgtggcaatgatttcacgactggccaccagatgctgtccttgaaatgacgaaaattccccaccatttcgtgattctcttcttgctgcggcgtgaatactacctcgttgttctttctcattctctgtttttatggctgcgttaatgtttgtgttgtgtcactccacccctacccttctgaggttttgagcttcttgtgaatggaggggctcaaagatgaaaattttggaatgggtcttcaattgggtcggtgagttttgacctaatgtgtgtgtctgtttcagaaattaaagaccaagatatatacctcctttttctttggtactatactggctgaagaagaagaaaagagaattggatgagtacataatgcataaatattatatatataatgtgtgtttggaaattcgttgaaaagccagaaatcaaatcaaatgtgctacaaagcgtgaaactacaagttgttatgagcctgtaaatttttcatgtgttgtatgagtagattggagttgagaaagatgcgaatgaatctaagaatctaagaaagatgtttagctttattacaaattgataattaacataatagagggagggagggagagagagagagagagagagagagagagagaaagagaggaggtgagtgttaattcaacatggagacgataggaaaccttttggacgttgaatctcatgagtatacagctgcgtgacctgtcccagtgattcttatatatatagtgctatgaattatatgaaatcaaatggggcaaatataaagggtccccatgtcttctgagggtgtagaaaatgaacacttgatggccacaatttaggaagagtgcacaagttggagaagtaaccggtgcagtgtgatacttgcagatcttgggaatttagttattggctcgatctgtctcgagcatttttcttaatgtaacgaattttctatgcttcatgttatatgttaggagtgttttccatccttagaattgcccaaattctactcaattaactaaaatgcttaactactattgtgaaataatatgtaacataaattgggtttaaacctaccaattcattaatgtcagagattaaaccccatgataaaatgaatggtcaacaagtcgtctacttcaaagttttctacttttctcattcgtgactagaaaataacatgctttaaagagggaaaaaagaagggtatctaaatctgccaattttagtcagtttatgaatctgttatatctgagttttcaactcagaaagttaaaaatatttgaggtttgattttctctcaagaaattcttgtttgaaatgatttgagcagcatttctgcacttggttcctaaatcacctgaagttcaagcttttaatcaaattggtcagaactccaatggcggctctatcagtccttctcccacttctggtagtgatcctttggtaattaccaacgaatttcatccaggaatacaaatccaattggtaatttaaatttaccgacaaaattactaatgtattttccgtcggtaatatataatattccttcggtaaaacaaaatgaagaaaaagagaacatttcgatttgctatgtcatcaaataaaaaaggcacgatgttaaatatgaatatattaaaagttttattatttgtcagtaactattaacggatattttctacgcatccgttggaaattactaatagaatataaaaatccgttgataacttttttttcctgatgataatattactgaccaaattttgggcgtcaataatctgttagaaattcagatttatcaacaaatttggggtaccagcggattttgaccttgaataatgacagcatttcttgtattctttacaaatttgattcattagttaacttgtacccaatatctgatggacatgtttatgtatctataaagtattgacatggaaatgatgatgtgaaaatatgttgattgggactggggtgttgacattgctgatggatctcaacttttaattccttgattttagttgtcatcttttttaaattttgtaatttttggatctgaagttcttttttttaaaatgtaccaatactactcagggattatgcatggcaatcttcgtactagctagctactatcaattatgttgtttttttttaagttgtagcagaaaaatacaggtaattttgaagaaggggaatgcattatatatagaagacaattatatatagataatgtggaacattttactctgttgcatttccatttagaaaaataacaagtttctcatattacgaaattaacaaactaaattgtttttttttttctctcgtgtagtctaaaactcataattcgtaagtatgatatggtttctttaaacaagtacaaagataatctaaattctacttatatcctctccaaagataaccctatatatatgtgtggaagggataaatattctacagactgaatttgtctacttgaatatggaaaaagatatatatatttactaagatgttatggtttggttctcccagtaacttttctcccatgaatcaacttgttgaattgaactttcctttctctgtaattgagcgttcaaagatggaggatcgaaaggggcaggcatggtgcaagggtcggtatttgcaggaaccttgaccaatgattccatcataaatttctttactggtccttctgctccacaaaccattgactccacacatatttcagtagcattagcacttatagagggtttgtatctaaagagtttagcatatgaattcaggagatgaaacatgtagtcgtacacatagtccatctttaactcttcttgaatgaaatcacttgcagccttgccaatttgatgtgcctgatgaatttcacatataacaatgaaacgaaacaagttaaacattgagaaggtgttatgtaatttattttggccctgattataataagtgattcaccattaaattaaatattcagagaggtgaaatcttttaagattaacttggtaagacttatattctagccttaatgaataagcaaaacttcaagattaccctttgtttgtgactattgccccaatccacagcaaacttaatggacctgcacttgtcatcttcctttatgggccaatagtggtgcaccggaattagtcctcttgtgaaaaaatcatagtaatggggttttacaagtagggtgggagagtcacatgccagaatgtatttttcactcacggaccaagcagaaccttcaatgtacaccttatatctgcacgaagcatatatatgattgaattgaaacattttttttcaagtaatggccacaatttttttttaggcaaggaaaaattaagggaggcaagagagggaaaggtgatcccaactaggttggcactagctcaccctcttggcctaagcaccaaaatccccaattcaccttgaaacatttatttgttgataaactgaacatatatatccaataactatatatattattacacaaaattatagaattgaagcaagaattcaaattttgtccctttcatgattcatagatagaatgcacagtttgaatgttatacctgtgagtgcattgacttgccaagtctgagttcttgtacccctcttgtgattctcgtccccaatccttgaagaaaactttcgtaagcatgctatgtggcttaattgtgatagtcaattaatattacacatggcaaagaatccaatactttgcagacagacaaaatatagtggactttcgttttgttaaaagggaaatactgaaaagcaaaattcagtaaatgtttgttaacaggttatttcctttaattttgaatgtacttttaagttttgtattgaatatatatataatattgccgctggattgtgttgcttggatttgcattttagtagtgctaggttgtgcataattaagccaatttatataataaaaaaatcctataaaaaattatttttttatattcaaataataaaactattttcgaaggagtaattaagcaaagctaagaagtgtgatacctgaacatataaacgagcattccaatcttgattttcagaaacattgcatttcatgagatcttgtctggtttcagcaacaactggattacctttccagtatgcataaggctctctgttcagccatggtatcctcttggttccttctttcaactctgtcaacaaaatctcccatggctttatgttaacctcagccctacgcagcagagatacaataacatgccatcaacactcatacgctctatgtggtcttgaggaaagaaagtaaagaggagatagaaaattttgaaaattaaattaaagaagaaataggaggaattgttttcttctaaatatcaaatgttctctttcttttccattcatttttccttctaccaaataatgcctcatcatttgtgttttccctttttgtctattctctttcctatcatcaaacaaacgcacctataaaactttaaaaaattctcaagtaacattattttttagttagattgtaaattcgtgacaaattaatctacattctacaccaaaccaaattaaaccctatttactcctcctacaattggtgtctggttaaacatttaaactcacgttcaacagaataatacgctttttacggtacaaaagccaaagtaatgtgaggtggtaacttttttttttatatcatgttagagttacgttgagtgcaactagttctcaaacacatacatcctaagtactaacattacatattaaatagtataaaagagtgaagttagctttagtagcttaattaccatccccagaaggaccaatcaggaaagacaatatccaaagtagcatcattcccacaatagcgaaacaagggtggtggttgctcaacattagggccattgtaacgatcagacaaaaccacaggccaatccacacaatcaaacataagctccaaatcaggtatcttgccagggtaccttctcaacaattgtagaatcccccatatgctaaaaacatcccttgtttgataggccttttcgtaagtctccaaataggccttacccttcaatatcaccaacttgaaatttgctgtttcctttgccctctccaccatgtcttgcgttatgcctgtgcgggcccatggcctcaaatcctcgtggatccaacggaagtactctggacacgtggcactggatggatggctctgatcgttttctgggattgggaattggttggtggagcatgttctggtgaggttgtaggcagtgcagttcaatgggatctctataggcttccggatggagactgtgaatggaccagtattgtatggtgtggtgcttagtgctgattttgtagatgaagctccggaaaagagaggctacacatatcacaaaatgaccacagaaaattatcatgctaggagtagtaacctacttaattaccaaattataggtaaagtttaattaagatatgaaatagacaacttagagagtacaatttaaacaaatctttttgaattatttatcttgatctctaacaaagtgatatcataactatgcaactcatacttattttattcagttgtataattttaaataacccttgaatgattcatccctgtatgaccaagaaaatattttttaaatcataagcaacaattatttataaaaataactaataaagcttaattttaaacaactttatgacacgtaaatatatattttttaatagtaaaaaaggctaaaaatgctaaatatatctaaaattaatcaactcgttaaacgatgctcaccaatttaacgtaatctagattctatccttggctactctgtcctataaatttatgacactaattgaatgcattggttttttttttaaaatgatcaaatatataatcaacaaagcaactccagaaaggtaaaaatattgctttgaggatattatgcaatttgaattgatatcacagaataaaaattaagaatactaaattagcatatatattgttataatgttttataatatatgtaatattttctctatggttaaagtataagttttgtttctcaagagacatcacctctaatatttgatatttctctgcaccacttattctgacattttattaatattagtaaaatatagaaagtgataggtgttctataattgaatgaaattttatgttaaatccatgagataattaatgggtccgcttagagggagtagcatgaaaaattacaaaatcataaaaattaaagtagtattacacaaaacttacaatgaatccaactaattaataataaaaactatgactactagatatatatttcctttgaagtcatgtataaataaaaaatatcattttcacctaaattaagaaaattagataaaaccatctaatttcacaaatcttaaataaaaaacaaaattatttttaaaatattttcattgaaattaaatatattaagaataaaataaaaatcttaaaaatagtaatacaattaaataaaaggtatttaatataaatatcattaaataaaaataaatttaattaaatttacttagcataacatcacaaatagtcaaataaaccaccaaacaataacaccgacgtattacgtaagcttaatacttacttcaaagctttgaaatggttaaaataagatagagaagtgagagaaaaagacatgacgagtacgttaaaatagaattattcaatataatataagggtacaatagcgacaaggttatgggtccgacataatttacgtgcatgaaacaggtggcacaaaattacaagctaggctcacaatcccataatgtcaagaatgggttggtcccttctttttggtgtgtcgtaaagtattaaggacacgttgtttacaaatacttcttacaattccacaatcttcaaataaaactctatgttaggtcaaccgacattttcggcgcctgttgtggttaggaacttaggctagcaaaaacactaatttatttcaagagagatgttaacacacttttttattatatcgttttttatttttaatagatatttttcatatattaattgttaaaattttaaagttataaagctaaaactaaataatgtttcgctaaatgtattttaaagtaaattatatacacaaaactagtatgattttataaaaatattagttcaaataaaaagtcttataatttaatactaattttcaaataaataaaaaatttaaaatttaatgccgaatcttgcttgaatcgtttgataatccaaaatgtggcacaaattcaatacattaattatgattcattttcaaaacttgaatccttattcaattgtcatcaagttttagtcaaattattgtttggtcaagcgagccatagagccagtattagtaaagttcccagctctttattgatgttaaacttgtatctaatagtggtatttcttgtaccactttttaatgataatcatttatttggctgataaaaaaaaagtgagatactagccctcctagctataagctaccctgagggtttttatctttttgtttttatgtttcccacttaatttttggctggtagcaagggttaaactaccacatctatatcttactttccaataagttacacctaaatagctaacatatccctcttgctcacacacacactatatctttcataaactttcatgtcatcttttttttttataaagtcatgtcatctttatattatcaaattcatttaattaatatatacaattatcttaaaattttatttttcctaaaccacgcactcctaaaaaaaggatacctactgttaaattgtccgtaaaaatgtaatggtcaaaattttgatatactataatcttaaaactatcttaatggaatttcattcagcttttgcacaataagcatagatgtacactcagctacatgacggttaaataattggacttctagttctatgctactatccctacattatatgtgcacttaatgttatatttttgtacatagcaaattactaccactttaacatgcaaataattaatgggtaaaagattaagtgagaaacgcttttaaaggccacacgaatatagtgggctaaccgtagaaacgacaatgtcgtttcgtcgtcacttcaatcatgcatgtctcgggccaagggaattcacacaccatttctaacgattcctaaggaattccccaacgtgtctctgcttcagacagcattaacgtacgaaacaaacaattaagtagcatctaacaacgttaaaaatagcacacacattgagccaatccacgtttgaggtaaaagtataacaataataacaaagaatactcacatgtgtgtctagcgtgcgcgtgtaagtcaacgcgccgatgatgagcatgacggggaagatgagaaccgccgtggatcgtggcaatgatttcgcaactgaccaccagattccgtccctggaatgacgaagatgccctcccgatacgtgattctcttcttcccctgccgtgattacaacctcgttgttattctctctcattctctgtttctatggctgtgttaatgtcgtgttgtgttgtgttactccaccactacccttttgagtttttgagcttcttgtgaacggagaggatcaaaaatgaaaactctgaaatgggtcttcaattgggtcggtgagatgtgtctctgcgttgcaaaaattgaagaccaaaaagataccctttatgttaatttctttttttgtttttgtccaatactggctgaagaagaagaaaagaccgagaaaattaggtgagtacatgatacataaatataatatgtgtgtgtgtgtttggaaactcactgaaaagcaataaatcgtgtcaattatgttataggcattagcttttgaataaactttaaaaatcaaatgagtactatggtataaaatttcaaaactataactactaacttttaaataaatgtaaaaagttacttctggaacgtagaaccaaacatatatgctcacagaagatcataataaccgacacaaagaagacaaagatacgaacctgtaaatttttcttgtgttgaatgtgtgtagattggagttgagaagaatgcgaatggtgataaagaatctaaaaaagatgtttaactttattacaaattgagggcatgtagatcacagattcaaaggtgcggaaaatgaaaaggacaattaacatgagggagggagagagagagagagagagaaggttgaatcaattcaaggacacgaggaaaccttttgaggttgaatctcgtgagtatacagctgcctgacttgtctcattgattcttttatatatatatatatatatatatatatatatatatatatatatatatatagtgctatgaattatatgaaatcaaaatgggacaacccatgtcttctgagggcgtagaaaataaacgtttgatggccacgtccacaattttggaaaaagtacacaattttttggtataataatttcttgtaatatttattttaaaattttaaaattgatttcctttttttgttataatattatttggttatcgtaattaattactataataattgtttttcctttcaaaattctcattgattgtttaaaaaaatcaaattaattgagtgtgattttaattgatgagaaaattcaccttattattctttcatggtcatgctaaatatttgacacgtgtacatccctacaggaggattaattgagtattatttcacaatttgagtacaattaaaaggaaattgatatcaattatattatattataccaatcttacttagatgttgtaaatcctttaatagttatattttatttttacggattaaaaaaatcaaactacttatataattaaataaaaatattcttatatactttctacgtcaatattcttagctaatttattagaaaataagatagtaagcaaactagtctaattgatcgtgaaacaatcatttgaacaatgtgttaggtttaattcttcacattacactcttttttaaaggttagagattatttttggtgaaaaaaattgtatatcctcactccttatttagtggacttcacttatacttttttatttttaataaatttaaagtttaaccaataaaaaaaataagcgttgaatgtattgtgttaaagaggagcacagacaaaattgtggaacctcaatccttagtccacgatgttgaggaagatggtagaatcagcatcgtctgccccgattggacagtcaaaaggtcatgaggttggagcataattgaagttgaatctaaagaatttactgttaaatagatatctttgtcctttaatccttttgatagcgcaatagtaaaatctaaatggtcaaatgtttaggataggatcggttaaatcagcagcggtacataaactgtttgaatagaagttatgaactcctctttgataaaatcataaaagtaagagagatccaacagtcttggaacttgagcgaatgatccagtacacgacaacaaggagcccatgcatgacaacaaccaggagttctagagggaaggagaaggaatatatagggtgaagagtgcatggtgatacggagctagttgtttaaacttaaaataaatgtttttttaaaaaattattaataagtatatatgatttgcttatcaaaataattagaaataactttttttgtgttaatcttatgttttattatgaaaaaaattctaactaattaatctgatatttgatcaaaagataaataaaatttgatctagaattatttttagtaaagattaaacttaagtattacttgaataattcaattttaatttcagtgcattaatcgcttgtattttatttacttgattaaataggcttattttattaaaaataagtattgttttaataaataaatttatacaaattgaactatgaggacaagattaatctaatggttattatttgtggtacaccataaaccatatatatggaagtcttctccataatagaattcgtcattctatgaaaatacgtaaagtcaacagagaggaagttgtaggatactttgattagtttcaacacttgtagattttactaaaaaaaaagttacacattttaatatattttttcttaacatttctagaacaagttattcacttatattcgaatgcaaaactaaatttgcacttataagaatgatggaaaatccgaggtgatgtagctgtgtaataactagttttggaattttccaaaattacgatcctctgttaactacaaacatttttgttttgccttgcatctcttaattagacatcttttacatgtgtgatagattttgccttgcatctcttaatggcttgatggactttatttacatgtttgatgttagacagtagtgcacggaactttgtaaggaatttgaattcttctatattcttttctttttaaacctacaagagaattaataaataagattgtcatggttaaaaactgtcacagaatcttaaatttaaacataaagagaaactaaattcatatgttttcaaaaagttgaaaaagtaaattggtcaatttaaaaacacaagaccaaaaccaaatttaaccgaaattcaaggatcagaaacattttccatacattttatattaaaaggtaggtgtttatcttcttttttttcccgatgcaaagtgtttttcttcaaagagactcttagttaaaccattatatatcttaaaaaaaagtgcccttttacccaaaaaagaaaaagcaccctaccaaaataaaaaaataaaaaaattcaggaagaaagtaaaggccagaaaaggtaggccgccaagtgaagttagtttttgagctgcaatccctcaatttttttccattaatagtttgcatttataaggttgacaaacgcactcaatttcccaaatgatgagaagccactctcagtgtatgcttcttggtgagatttatctcaagataaccaaaagcaaaacaaaattggttattatcatgatagattatccatcaacagttattatcatgctcacactatagtgacagttttggattgctatgcttttaaatctcatcattaagcataagtgactcaagcttatctcaatgaatatgaattttttttactcggttaaaatatttccattgctaacaaatgaggaaaaacaacaggagataaatgaaaaaggaaaattgaaaccccccattacttcttcttccctgcttttccttcctttctccttacaatttcatcagcatatttgacaccctttcctttgtatggttctgggggtctccacttcctaattgaagcagcaaactggccaacctcagatttgtcatacccactaactgtgattctggtgttttcctccaccttcactttgaggccatcagggattgtcatcttaacaggatgagaaaatccaagattcagcacaacttcgtttccttctaccatagcacgataaccaacaccaacaagttgaagtttcttgtcaaaacctttagatactccaatcaccaggttgtctgtaagtgtcctgataacatttatttgcaaaccacatgagagtcaagtatgaatacagacaaatgaaatataattagatttcatatatttatgaatccaaattgtgaagcactgcttaagcttccaaaggtgaaatttataattctactcgtacaaaaaaaactttcatacatgaaatggaatgatggtgatgatgatgatcactataaaagcaataccaacaataataatagcattatgtcaagccaagagataccaagagttcatttcccccaataacaaacaaaaaaagtgaatgatgaggatctgcaaaatgtattgcacaaatttgaatagtttcaagactattcataaatgcaggcacaagtctataacttaaatcctttgggacactactatatctcaagctcaataacaagaaataaccaatctctgaactaccaagggttacttgtaaaagttaagtgcactgagagtgtgatcaatgttctcaccgccaacgttgaaaagttgcaaataacacaagcttttttcatcaaattatagacatgccaagaaaggggagctggggggaattgcgaggggggcgtcaaaatggaagttatcaataagaacttcaaggaaccttatcccaaacatgattagttactgtttgttgtagaagggacaagaaaaacaacaagaaccatcagggttttgataaccaagatattctctgaattcataaacactgaatattgtaaacataatattctttttaggcggtatcaaatgggaactggggagtttattccaggatttgaaactattgactttcaagtcacaagtgaagccaacaaccttactgttgcatcaatgcttacccttgcaatacaaaaatctaatcagatatgaaattctaatcaaattatagtgtcatgaaaacaagtcatccaacatatggtcaagatcacaaaattccccaaataatataattatcataaaccaataaattatcatgattaagaataacattgcccaattggcaagctcgtccattctgtatcactactttcctgtgttatctctcaagtaattaatccttagagtccctatactggaatatattattgtcatgactaagtaatagctaccaatatctagctcaaataaattattgtcatgactaatgagaaagcaatgccaaaaaatgaataataggttataaatttacaacaataattatccctcaaacattgacgcaatatgccccagacattggccacatctcatatttcctataatcaaataaaaataaaggttttcttccaatttcttttcagtgtgttaagaaaatagttttgaaataataagaaataggtgcaaaggcaaccagcatgtattgagagaaaatggaaatgtaatactcccaaatcttattttttaaaaaagaggtcagcaaaatgaagtacctaaaaagcccatgcatttgattggcccttctggtttcaactgcctttttaacccttagagtccctgactcttccctctcaaccaacacttctcgaggataagttaatgcaagttcacccaaaggacctttcacttgtatatcctgtccttccaatttgactgtgacattggatggcacaggaattggttgcttcccaattcgtgattccttacattctacagtctttctattgaaaccaacatgagcaccaggaacacttgaaactctgagtttattagtctcaccaacaaaaaccgacttcaaattgctgaaatagaacagaatgattagtgagatttctcaaacctatagaacattaactttgagttaaagcagcttttcatcaactaagaaattaatcaaattatatcaatcatatgaacacaatgcatgcctcacatcaccatgtttgtataaaaggctcgttatttaatgtcctccttaaatttataagttattttccacctcgtagcctttgtaatcattgttaaaatgcaactttgaggaaatgtaagtgaaacatccaactagaacataatgcatgcctcacatcaccatgtttgaataaaagcaaccaatgaagtggcagaaacaataatgtttcaatcctttctgtgaacagtaaaatatttcacattccctacaaaaatgattttatcaagaattccccgttggactactgagcaagcatgctcattcaacttctcatcaagcctgaacttgtcacttgcaatatgaaaaacacgttcagagtcattattcttcttttttggtgaacttaggatatcccaaacgggaagtcaaagaccattcttcgaagaatttagattcatttaagagactaaactctcgtaacatatgtttttttatacccacggactagggatcaaagacctaaccccatgccactataccactggcaaacatttcatcaaatattgataacaggcatttgattaaaaaaaaaaattcagagtcattattcttctaattttcactataccactaacaagcctttcatcaaatatcctcaatgcacgcaacacccacttcattgaattccaagcacagattcacaagatgggattattatcactatcattatcatctactagcaaatcatttagaaaaccatattcaattaaagacccataaattcattgagccagcgtataattttttagactcaattgagacttgaagaactcagggcaactaagtgaaacagtgagagagttcagaaaattgggctgtcccaaagttcgaaactttgtgtgctgctacgacaaaggattcagaatcccgtaatgggtgttttttcattcaagcgatgcaacacttgataaccctttaacagttattgaacaaagcaatgtaacactggtggtgcttcaaaacgcagggaattaagaaagtgaagtagaataagtggagcaaggaagagaaagagggagttaggagcttaacctgatgcgaaaagaggaagtaactgaggaagccattgttacaaggttgttccaccaagagcaagtactgaagaaaaagccttatcctaggaggtacctgttatctgcaacggtgacgtatccatattttttattattttttaaataaataaaagcgtgatcgggaataagaaaatggaaattaaggtttgtggtccaacaaatgtggattgggtattagatcatacattttgggtccaaaagcccaacatcaatttaagcttcagtgttccaattctaatgaaacaatggtgtcatttgtgtatgtcaatgttttttggttgagtaaatactcactctactgattgtccaacaggataagaaaatcacatgttagttttttctttgaaaaatttggactgaaatagtttctagaaaaagcataaaatataattttcacatatatggaagaacacaaaaggatgaatttgatatctattttgtatatttattattctaatttaataacagctttttcataaaaataaataattacaatgtactgagaatgtaaatattttttaatatttccatctaatcataaattttcataagataaaattattaatttttgtaataattaatttcaaccccatgcttcgggtgttttttaattaactgacagtgaaaatatttacattgctaatatattaaaattaaaatcaaaaaataatctactaatatcatgatgttttaaggatcaagtggacctactctttaaaggatcaagagaatgatatgctttcaattaagattaaaacaattctctaaattattataaaatgttttagtaacacagcatagtctatacatatttgagcaatttactaagtatacacggcctattattagaaatccatgagtttagacttaaagttcatgttcatcttggttcgtgtaccatatcatagattgtgatttgattttaattaaatcacaatctttcttctccatagcctaaatagatcttattagttaggataagtgaaattggatactggttataacttataaactatccataacatgaataatatgtgtgtaaaggaaaagttacgaaaaacatataaaaataagatgtatagaatatgctaatccattatatgttttttgttaagagcaaaaaagatactactttttgagttgcttcttgaatcttcagtggtaaagtagattttgtgaagttggctcaggtccttggtctaagagtaactagcagagctaatgctggaactgcccaactttatgctgtaaagtgtgcttgctttagaatatatgtcaagtccctccacctatatatacacataactgttctctggttttttttacttctttatgctgataaattgttttcaacgtggtgatgatagtcttcaacatccatcatgtgtacttggctcctttcatcacatgcaagaatatggttttacagacacaatgttctgtgaacacaaaagggtaataacaaagtgttgttcctccaatttgagagtgtacttctaagattagcatatataaaaatgataaaaaaaatgtgggagatagaaatactttttataccatgttatggtgtcaatttttttatattcagataatagagtttgctgttctttggatgaagatttatgtatgaagtatgaagaatttaaacacagccctttgttttttttttattttgatgtatttttatcaagttttgtttgcaagatatgcctattgtgaaaagttcttgtgaggaatattttgaaatcagctttactccagaagatcgctatctgccttttcagtttcgattgcgaaagtgcttttaacaggtggtcaatcaaatagcaaatgttagtcattttaaagcatatgtttttaacatttaatgttaaaaagttaatatgtttttaataatatttcaaaattagtttagaagattttattttatgtaacaataaaatagttaaaacagtttaaaagtataattataagcatatcttcaaaattttatatgggaatgcaaattttctaaaaagaaatagtaaattaaaaaaaattgacaaaaatattcaaaataaaataatgcatacagcaaggactaatggtctaatgttgttaaaagaatttattttttcttctgaaagtaatcaaacacatgaggtgatcatgacaccatccttttggttacatactaaccaagtatgaagtaatctagtacctcattacttttttttttttacatatttctttataaattatattttgacatgttttttcattggtgaaaatcaaagacatactaaaaatttataatcactcatacatcatgtttaatcaattaagttaaatctttttgatacatttaacatgtttgttttgcctcatctcaaatatttcacatttaatatataagcataaaattattgcattgacgactcagcagacaataacagtaactaggaagttgaaatcaaactgttattttctttttctttttttctgaggtaactgtttttttcttaggcgttcaaccttttgatgagtattactataggcaccgaactttaaggtaacaacaagcatttgaaactaattagaggaatataaaattaagttctatgcattgcaaaccattgtgcgttgatgcgatagcagcaggaattgtaaatgttacatcatttagtttctgatgttacatgtctagcacgcttgcaccaacctccaactcaattttgaagtatatgattgatcctttttagatgaaaaaagaaaagttggtgtcatacgtaccatcttttacatcccttaaaacatacataaaatgctgaatgatgttaaactgaggccaataagctagccacgcaactacaaaatcaattgtttcctatacattcgtgtagcaacttttaagtatttaatgtaactttaaaagattaattaagtagttgtgacttaataaaattgcttaaagtttaagtttgtgcaatacttttctgcgtgaatttttactgagaatcctaatatgtcattttcgttaaacttagtagaattgagggtgtttcattcttctgccatgtttggcataaaataatttcagtcattttaaaattttgtagatataatttaagtaatagttagaaacttctaatccaataattgactttaagataaaattatctaataaaatattattaaataataatatgacactggaatgtgaactatctctttttttagaagagattatatatatgtatgcggagaggaataaacgtaatgaggaaataaattttaaatgagagtaaggaaaacaaattaaaattaattttttaaaaaaaagtatatgatcactttttcttgacaaaaagtatatgattacttttaaaaacatgacatcttaaaaattaagtgtatgtttgtgttaacgttgagttgtctaaaacgtagtttcccaaaggatttccaacgttacttttgtgttaaagcccatgggaattcacgctaccacgatttcaacgacaacacaaacataaacatagcttaatatgacttgaccattcataacaaaagttaatgatcaatctttaatatatacaaaaaaaaaaagcgtaaagagtaaagagaaataattaggattcaattcattaaagataatgggcattaaacatgttaattacaaggcaacccaccatgcaccttggttagtttacaagcaaggtcctacaccacaacaacatatgcatgcaactagccatcatggtgtgtgtccaacaaagaaaagagagaaaagagagggaattgatcagtgatgtccaccatttgcatcatttccactcagagatgttcaaattttattggcaacaggggtggtccagaggaggtagcaagtaagtcaatggggacaaacaggggagagacagaggagagggtgtgtgcctcaaaattggggagcgtgagaggttgccacgcttttgttgttgtcccacgcgtgaatatactatactatactgttactgtgcacctttttggggggtttcaaaacccaatgaatccctttttcagcctaactgtttaaaagagacccttcacataggtttgttaaccaattagcagcaacttcactttgatccaagttaaaggcagaggtcaagggtcagtgaacacaccacaccaccctcttctttttcttatcatagatagaggctttcattgcttcaaacaagaagagctatttccatcttccagtctaggatatacaagcaatgtctgtaagtcccttcttttaatcatctctttctttgccacacagaatggttttgttcataccatgtatttgtgtctttgaagagaagttgattaggagttttatgactgagatttgtgcaatgtgtgtgccattgcagaatcagtcatgctataacggttttgaacagagttattatgagttcatgtattttttggatttcagttggatagttcaaaagtttttgaccctcaaagtaacaattttttcttcttcgtcgttttgtggattggaatttgaaattgtacattagaaattcgtaaaagtacttttccaactgatatctaaacaaggccttatacataatacattattaagttcaaaagaagtactaacaaccatatttcttgcagaatatgatagaggtgagagttccaaatcttgattgtgaaggatgtgcttcaaaattaaagaaagctctcttcaagctcaaaggtacactttgcataagcagttcttttagtgttggctttttggggtcgtcctttattttctggaggctatgggttgagtttgtagacatgggccattgcatggcaacagttgtgtgaatcttagcattttatttgggctttgatttccaaaatcccatgtgcattcctcacttgctttggtaagagtagaaccatgagtcaataatttggtacaccatatccattctggggtccatgtagacctccctgttgggctccatttttcttcatgcaaaggtggctcctctgtcacaccttaaccaaatgacattatttgtcatcagaaataaaaatagcatttctataggcttacagttacaacaaatgtattatctttttttaagaaactgaaccttcacattcttatttttactactgctattattatttagtaatctaatttcgaggtaaaagcttgcaagttatacacccagaattatttcattacttttcacaatgtgtattatgttacaaagaaatacattttttttcttaaaaagtgaggtcaagaaaaacatggcatgatgagctctcattcagcatgaaaataagcatgcccaaaagcaattaaaaagtaccataaagtaacttttacataatccaaattgggtcaccttttagtcacatgtatgattaagttagttgcatatttgtatgcaccatgttaacttttgaatgtgtgatatgcaggagtagatgaggtggaagttgaaatggaagcacaaaaaataacagtgaggggctatggtttggaggaaaagaaggttcttaaggcaatcaaacgtgcagggaaagcagcagaaccatggccatttccagggcatgctcatttttcctcattttacaagtaccctagttacattgttaaccattactatgatgcatacaaaagtgaagctaccaatggagtccacactttcttccacacccctgcagtgtattcagttgctgtggcatctgatgaagcctttgcttctctctttagtgatgataacccacatgcttgcactataatgtaattgaactaaaccaggttcatgtatacttgttttcttcacttaaggttagtttctctttgaagagaaggtgaagaagcaaaattgagtgaggcatcttttccaagggaattttgtgctttgtttattggttaactttttttgccagttttcttgagtgtattatcatgtgcctccttttaatatccattgcgttgcttggctcctttcttttttgaaatttttttttataatgaccttgttgaaattaaaacatataaccttatgtattttaactcaacatccaatcaatagatcttaaaggactcaaataacaattacttgtattatgaataacttttaaaatactcatgcaatcttaacatattaagatgctatacaatttttttaaaaaatgtatcaacaattactttcatttaaatatttgatcattttaatatataaaagacaaaaatttgtttaaggaagtgagatccatttccaatctttacatttctgattttgtttgtcgtataaaaaatttaaaaaaggtaaaatgcatgcatcaaaagttatgaccatcagttaaataaaaaaacatcttagtcatggattttaaataattaaagtaattattataaaaataataaattaccttttaagtacagggattagaagataaatttaatgtaattatagaaatgaaatgaataatttttctttaaaaaaattatatatttttaatttatgttatatgttataaaacaatctaatgaactactaacaatttattaattcgagtgaaactagacttgaatatcttaagtttttaaactttaattttataaaagaaaaatatataattgaatagaaaatttttactaaaattattaaggaaaataattcagttgattaaatataatatatgagttgagttgttattaacatttgatgatctcttcaattcctacccataaaataagatttcattaaaaataatggttttaatcgattagattttatttcaaatatattcattcacaaaattgataaatactctccaatagataagatatgaaaaagaaaaaaagaaaactcttatgaaatattctccaatagagttatgactctgacaatggagtggagatattgaaggggcttcattaaattatattgtgtaccaactgctactgtagtactttacatgcaggtcaggagaatcttgatttacaaaagaaagcagccgagaaggtcctttccaatattaggcccagccaaattcacccactaactgtaatttccactttcaaccattcaatttgaatccgccatcattatcatcgtccttgcatcactagtagctcatttctgctaagatggacggaggagtgactttgctagaaaacaaattaatcacttttctaaatatatatcattgctttagtttttatgcattattaatgtaaaatttttttatattttaattaattaaaaaatattatatatatatatatatatatatatatatttaaaataattattctaaatatctacaattttatcagcataataatagatgttagttagtgtgtcgaactaagaaaattctagtgctacatttcctttttttttgtgtgaatagtattacattcctaaagaaagagaaattaatcaaaattaacacaagaaatgaactcttttaagaatgtctttggttatgttctgattaaagttagaaaaatatatttgatatcttcgagcttcaagacaaaaaaaaaactgttggtttggataataattatttgtaagtcactcgatctatctgcaaactaaatatacacttaatttgttttgggtaagtttgattaagtttcgctggactcgagagctatatcatctttccttttcacaagttttcaggtaacaagaagatcgtgaaaagcatatgccattagagcagacaatctaggaagaatattgtgtatgtaagccatcgtatatcttatgcgaagtgacaactcttttcttcatcataattttacacgcaagaattacttttgttgataaggatattctgtcggtgccccattggcattggtatatatatatatatatatatatatatataaaatgatgcatgtgttaatatttgtcgtatgtaaaactgatcaactgacttgaatgttgtattttgttttgattttcaacataatggaattctgagctagatcttgtacaaaattaccaaggatctaaactaacattcaaacttttgtgctgcaaaataaaagaagaaagaaacgacaaaatctaaaaatactttatgacattggacattgcatttgaccaccatttttactgtttttattgaatattctcctaaatgaaataataaaaaaataaaaaggaaaagataacataccctatgaaaaagaaattctagaaatcaacaagtgaaaaaatattaataacatacttcttttaagttttgagatgctccctaaatttaagtgaactttacataaatctcattaaataataagaacgttaaataaattagacccacattatttagtaaaagttttaatgagtaataaaaaaatgtagcgaaaagagtgatgcaactgtaaaattctagtctctcttgagttatcaatgaataatgggtttggatttgaaaaattaataatagtgaaaaataaagggtgttttatcatgagaaataatcatttaatttttgtgatgaacacaaaataataaatagttatttttactttttttaatggtaccaatgtgactttgtggggtagaattaattttattgtgttattcaaacacactaggagtaatttaacttgattttcatgaagtttttttttcctcttcctctccaaattccaattcactttgcatttacatattctaatgtgcaatgatcaagtttcgttttcctaaagtcgatcggaaaagataaaaagatgagaaagaaaggaaaagagaagaaaaaaccaaatggcacagaatgtcatcagcatgcctaaaacactcaaaaatttgtcctgtgtgctgtcgaattgtaccatatatgcagcaagaaatttgcattcagagggtccatctgttggatgtgactttcacagtcacacgcacaaataaaaaagaaactctaaaacctcacgcctttactcttatatagtacatgctcctcaaaattctcaaaccccttcttctctcactcttgctttcacacacacacttctacctcttcaaatggctcaggtaccaattttcatttcacaatttttttttctttcccttggattccttatgcacatcttcatgcttgttttgttacatatttattatttatatacttatatatgtatgatccatagaaataatataaaaaattatgtgatcaataattttatttaccattttttccctttctctttgtgcatgttatccctcactggatccacaacagaaggttgtgttaaaggttatgactatgactgatgacaaaacaaagcaaaaggctatagaagcagctgcagatatctatggtgggtagtttgtaaaaatcaaagccaaattttctataccttgaattcatgttaatataagttagttatataaccaatgattaattgatctgtttaatttttggtgctttgatccaaaggggttgattcaattgttgctgatgtgaaggagcagaagttgactgtgattggtcaaatggacacagtgaaaatagtgaagaagctgaagaaagtaggaaaagtggatatagtatcagttggacctgccaaggaagagaagaaggaagaaaagaaagaggagaaaaaggaagaaaaaaaagaagagaaaaaggaggagaagaaagaggagaagaaggaagaaaagaaggaagagaagaaggaggagaaaaaataatagacaatacttgattatcatctggttttgtctaattctacccttttattttcttttctttttttttaattttgttttgcatattttcccatattcagaagcaattgttagctgcaaaaattgtctatagagtcttttattttttgctaatgtgggtttcttctcaaatctgttgctcacaatcctttctgaagcatggatcaatcttcaattgctgagaaggaaatgagttataataaaagagtatcctaagaattggccagtggacaagatacaaagaccattaatttttaattcttccctttctctctgttttatattttctagtatagagaaccagggaaggtatggtaaattggttggcttcaaaattgttatttgttatgataataaaatcgtagtgcaaaactgcaaatgatttgattattttatttttctatgttatgcaagtggctcttgcgacttgtgactatgataacatgaatgcttatgaacagaaaccaagaaattttcgatcatcaagaaattcctcctattggtttgttgtgggtcatttgatcttagccgaatggcaccaaagtccaaactggctagcgaattcgccattccaaataaaactgtttttgagcacacaattatgggtttccaattatttttctaagaaagcagacgagtccagcataggtttaataagcaaaccatgttaagataataagatattaattgtacgaatatataaactaatttacatttactaaaaatgactaatttagttagtaatattaattcttttaataatttatatttccaaaataatgtttaaaatgattgggattcattttctctctttttatttcattttttctacctaattaattaatatgtattagccatattctttaattatcacacgaaaaagaataaatttatcttattacaatttactgtattatttattgagtacaaaagttaaaataattaaaaatattttggtaaaagaatacctaatacaaaaattaatttatatttttaaaagagtatgatattgagactgatgtattaattactattaaaaggtttagacaacatctctccatcaagttatattttagagtcatcttaaaaaaaatgttcataagaaaattatttatattaaaataaaatataatgcaacacattaatttctttcaagatgactgtataataatttaaaataaataaaatatcaaaaaataatgaaattcctactaaaaatatgacccgtccctatgatttcttgaccacttcaattcgtttctttttttaaaaaaaaagtgaatttttataaatattgatagctggaaaattcttcataaagtaaaaatttagagtattattttaatattttttctaaaagattaaaaatctagcttctgtaaacaaattttagcaatgtatgtgaaattcaatatatgaaataatattttataattcaatggttgaattcataaaagttaacagttatcagcaagtacttcaataaactagcgcgctgttattcttgtttaattaaatgttgagtttaaattttaagtatgtattgttttaaatactagatgaagaataaaaataatggataataactaattaattattataatatttgataaaattatctaaaaaattagcttgaaattaaaaaattagatgaaagctgaaaaatcagcatgtagttaaaacctaaaaagtggtagttagaagtcaaaaaagttaacttattaaattataagtctgagataaaattagacattaaaataattaaaaagtataaaatgataaaaaataaaaaaattataatttattttaaaaaataattagaaatttggataaatatattaaagataaaaatataaaaaattataaattagagttcttaaaaaaaaatctatttcaagttagaaactagtattttttttaaagcactagaagttattaaaaaaagttattcacttaataataaaataaaattttcaactaataaaaaattaaaaactaactcaattatctttgcaaatgaaatactcacacatgataaactcaagtaaaaaatatctcttgtctaaaacaaatggcaaaaattataaaacgtgtaacattaactttattttaaaaatacagtattagcaatgctgaataggtttttctatgaaaacccattcaaggcataatttacactcttctcctagcgggccataagcagccatgatgttactatattattaggccgtaggaatccctaatcaagtaatcaatattatgcaatgatgaagaattttaaatttatggtaccgttttactattcactactttcccgtttattccggtagaataagttactagtagttcaaatgagttcatgacagctcaaattaataatcattgtgtagtcctatgttttatttattagtaacgttttccatttgaatcttgtggatgtaaatttttttacaagaatacttgtacgctaaacacataaataaataaataaataaatgtatttttaacccctttaaatataattaaatggagttttagttttctaaaaaaattgtaagaattggttgctatgaatttaattttattaaaaatgcatgatttctatcactagtcagttgtgatgtgtacatgcatagacatgttatgtgaacaatcacttttaagtaggatatgatgcatatgttacgtcttcattaattgatagtagaatatattcacgatgaagatcagagtaaataaaatcgttggaaatgatcaaaactaaatttaaccatatatttatcccaaaaaattgtataaaacggtatttgtgatgacattggacacgctcacggttgtggacctccaaattcattgttcatcctcacatgctgcaagactataaagaacaatttgtagtccaacaattttacagagaaacactagactttaggaataataaggtgttaaaattcaatacataaaagttgagtgtgccaaatatcaaccatcgaatattgctttagcaactccctattaattctactcttaattatatgtgatgtaatgggaccctagtgactcgaaagttctatgttaaaagtgatggtatttatgaaatacaaggggccctttctgtcgtgactcgtgaattctggcttataactggtgatattgtacttggaatgatcaaagatatgtacagcaccgtgaatcagtcaaatctctgtatgatgccgaatcaatagtgaatctggacaaagacttgagcctgcaataaataagagcaattcgaattcaatgatagtttttgcatcaaattaatgcatgattatgatcgttcacttacttgaaattatcttgcccttaacggcaaatcaaaagtttaagctttaattgcattgattaattatcttaaagcatctctaatggttgcttatattagtttttaaagttagaccatatgaattattagttttttatcttatttttttcattttgaattttatcttttaaaaaaattgtttttgttctttatcttcttaaaaaattcaaaatgatcattctattagtttaaaattaacacacttaataataatcaaatactaacagctaaaaatcactacaaaataaaaaataaaagagaagcagcagggtaccaaccgtttcatcattcccctaatctcctttttctcaactttaaaatcacaaacctcacatccaaattgaaaatcctcaaaattacataacaaattcaagaatcaaagcgaaaaaaagaataaaaatactcatttaggtagtcatctagattcttattgaaaggatgagggagaatcacattatgacatcctgtaaatgatttcattggagaattgaggttcttgttgaatccagcaaccttctcgagtttgagtgcaaaaaaggttgtgggtcgacaattttataagttgagataagaaaacaaaaaggatattgtgcaagtaattttagaaaaggtagctaggttgcacatcaaattttatgtggatgatgttatactaaagctaaattgttaattaaattgtgtaaggtttgtgatttttgatttgaaaaaaagggaattatgaattgtgaaatatgaaattgttaatgcgcgggtacttcttttttattttttattttgtgataacttttagttgttggtatgattatcgttaacatgttaatttcatactaacaaaatgactgttttgaaaagataaagaatcaaaatagtttttttttaaaataaaagaccaaaataaataaaataaaataaaagatcaaataaatcatttgatcttcgagttgatcatcgtaaaacgtcattcaagcaggtgaccttttgtaaagttttgtgaaagttacttacataactcccacaaaggtttggtataaataaaaccctcccgcaaaggttgcttaaaaattaaaaaaataattttctgactcaaaattagaatttttgtaagtggaaaaataaaacagaactcattaaaaataagctaagaactcaaactgagttttgtgtttaatttgatttggtgaattatgagatgaaagattggagaaggaaagaaaccatgcttataaaatctctccattagtttgattgattgaataaatttaaaggaaggagtaaattttgcggaacccaattcaaaatagcttccatccaaaggtggagagaaaggtagaacacattcgttatgggtgcaaaaaatactcaacaatgcaatttcgttgatcaaaataaacaacagaatcacatattcggtgtatattttagtgcatccactcttacacaaagtaaacacaattctgtgttgataaagaaacaatcgaatcacatttccatcaaaagggtattttttaaataatgaatacaataaagataaggagtgagaatagaaaatatatggtgagaatagcaactcccaacatgtaaaatggtgaggcccaaattgtattagcccaacactctttgtagtaccagtatcctaagagagttgctattggtcccaataacttttgctattgacttctataatccctcaaaattttaagattattctttttgaaaatcattacgacattgtgtttttattgcataaaagggataataattttttgcacaatggaatcacgatgtcattatacaagaggggggtgggttaaaacatgagagtactacagaaatataattctattgtacaacattgtaacaaaatcacaattttatttagattttgttctaggaaaaaaagaaatatacaatagagtcacactttcgttgtacattttttttttctctccaaaaaagatactaatgaaagtgtgattctattgtacaacgaaagtgtgaaattttgcatttttgtttagtattttttgaagaaaaaaatgtacaataaaaatgtaaaattttgtaaagtgtaatcacaatttcaacagattttattataaaatagaatcacgatttcaatttgcattaggctattgttgcacaactcaaaatgaaatcatgattctatttgatctccaaaatggggggaaaatgccaaagtaattgcagggtggggtgggaaaaaggtaatttaatgattgctcttgatgctcttgactagtaggggtcaacagcaattttgttgggatcaataatatcacccgttttaatcttcttacaatctcactctcaaagtcacattgtgagtgtgtaaacctattgtttttattctttactttgttaatatgtcatttgtagcagcctctagtacccctttgggcaagtgcnnnnnnnnnnnnnnnnnnnnnnnnnnnnnnnnnnnnnnnnnnnnnnnnnnnnnnnnnnnnnnnnnnnnnnnnnnnnnnnnnnnnnnnnnnnnnnnnnnnnnnnnnnnnnnnnnnnnnnnnnnnnnnnnnnnnnnnnnnnnnnnnnnnnnnnnnnnnnnnnnnnnnnnnnnnnnnnnnnnnnnnnnnnnnnnnnnnnnnnnnnnnnnnnnnnnnnnnnnnnnnnnnnnnnnnnnnnnnnnnnnnnnnnnnnnnnnnnnnnnnnnnnnnnnnnnnnnnnnnnnnnnnnnnnnnnnnnnnnnnnnnnnnnnnnnnnnnnnnnnnnnnnnnnnnnnnnnnnnnnnnnnnnnnnnnnnnnnnnnnnnnnnnnnnnnnnnnnnnnnnnnnnnnnnnnnnnnnnnnnnnnnnnnnnnnnnnnnnnnnnnnnnnnnnnnnnnnnnnnnnnnnnnnnnnnnnnnnnnnnnnnnnnnnnnnnnnnnnnnnnnnnnnnnnnnnncactgggcatatcaatcattcatgtatacacacgtatttatataactttttgcatcgcatgtgtgcacgatatctttttcttccagtttcatttaatttatttggtggataggttagatagtcttcttttctgttttcaagttgtaggtgttgaatcataaagctcgtgaaagagctagacatataattataacactaactcctggttcactaatacctgtgaactacgtcttgatactactattgaagtcaaacttttctatagtatcttcccctgttcataatccatgtcttgaatcatttttattcttggtgttggttggtttaactattggatcgtttaattatttcgtactttgtttactatataagagtaggcacttttcctttggttcttgaatgattagccattaatgtacgggctagctgggaaacatgcatgtatttttatatttaattatggttcttgatgtaaataaagtaagtaattttctgtttttaacgtgtttatttaaattatttatgtttttaatttttttcacttattttaagaagtaaatctcatttgcttaactttttttaaaatgtttgctttatttttaaaaaaaaaaattaaacaaactagtccgtagaatctaagaaaatgacctgcaagttgttttgttcttgagaattacctgaatatattccatactcatgtgttctggtttaatgtcttccaagtttatttcataagcatgtgcaaccttaaaatgcatctattgcctaattttatattaaaagcttatacttttctttcagcattagcctgcaaagtggtctttcaagtcccgcacagttccaaagaatagtaaaaacatttatcttatttcttttccgcgatctaataaatacatattttcaagatccttaaaatttcatatttttaaattttttttaagatttgtgataatgaatgtgaacattaattaaaaaaagtaacaagtaaataactttatccatcagaaaaaactcactgtcttgcatttgcaactctcttatcaaaacaaaggttttgtttggcttgcacgacggaattaattaagggaagacaaaaaatattacttacttatgagtttggtactgggttgactatgaaaagaattaacataataatttttggtcagaagttaaaatttccgtcttttgagtaagcggcaactcagtgggagattaagatatttggtaaaaagatgatttgagggaaaaaataattgattttctttaggtatcgggcctactcacataaagacacaaacatatatttttgtatctctatttaattccctattccatatctcgtctatatcaaataattttatagtattatttttattttatttctcacttatttatcttaaaccaaacaataaaaaatatcaattcatttttattttatttctctttttttcttttaaattatttctcttttattttcatctactatatttatcttctaaaccacactgcataaaccttgaagagcatgacttcagaagttctagtgcttttattatataactacatactcaaacatgtatatctgggtgtcaacaatacatatccttctaccaagagtaaaaaactaatcaagatttatttaaagtacttacctatcctaataaattcctttctatacacatgaatttgaagatcgataactcaatcatatatttaagagacataattgtaagtcaaacattttaagaaatataattgtagtcaaatatttcatattatgttgattatttaatataagtagttctataaatattcgatgagccttgagacatatcctattccaaatgaatccaaaaattcaactcaatcacctaaattttaggtaaaagaaagaaatataaaggctattaaaagaataactaaaataggctataatactaaaaattaatgttacaagatcaaaaaataaaataaagaaatggtaatatatgttgaatgttgttgaagtgaatcgagaaaagctatgaataaagataatgaatttttcaatttgactaaataaaatgagacacgataacccacatacaatgaattgcactaattattattttacattaattaaacacacacaaactaactaactaatgactggaaattattattaaagttagtttattagaaattaaagcaagctaaaaatccatttagccaaaaaaaaaagtgaaaatttacttacacgggtaaataataaaagtttaagaaattcaaatgctgtttcactatttcaagaattcgcttctcaagtattatatattatgaatatataaaacagatctaaacaaatactcacattattccaaaataattatagttttagtctttgatttcttttttgtttaaattgatcgatgttctttctttttaatgtgttattcaaacaacaattttaattttatttttcttttattaaataatgttatcttaaaagattgaataaaatatttattaaaactaagaaaaaaaatattttaataaaattatcttataataaatactaattcttttagaatatttattatttttgaatttatgtgaaaaaaccttaaacataaacatatagtcatttcagaatggaggaactaatgattaacattaattggccggtagtcaagctatatatattaaacacaaaaaccacaggatataccccaaaaaaattaaaattcattatttgtgttaattagtgtacgagtttggcatataaaattcatagttaaacaaaaaaaacaaaacaaagtcttcgtcaatttcttgataatgactatatatatttccataatcatagttaatatggtgttggctgttgacattaattcgaagcatctgtgtttgagacttatgtggatgttaagggaaagacagttatagatttaatttcatatatacataacacatgacacagccatgcgtaagccacaaaaaggtctggttcaaatactagttgtttcatggagcaaattaatcattcatcttaattaatataggaagggaatcccatgccaagattttttcaacaaggacggtctttattattttgtttgatttggatatctctttaagctatttgaatgctcaaataatctaactaattaaacatgcagtatatgaaaatgttaataaataagaatttgattctgttggtctgctgttgaaatcgtatacactgctatatagtccgagaagcatggcattcactgctataacgaataactaggaaattgcaatttttgtaacagaagacattttcttatatatatatatatatatatatattatcaattatcaaatcaaaagataattttttattagatgatggaatacaagggtatctctagttctactcgttacattagtaggtgttcaagaaatgctaatacaagcttaaaaggagattttaaccattattacttataaaatgatcgagatattttttattccaacttcaatccataactaccttttgactttgctaatttcttgtaaaaactttaaaagattttctaaattatcaattatagaaaatcaagatcttaaaacctataattatcaatttttgtcagatagaggattttagtaggtattaatcctttttataaccattacttaaatattaattaatcctagaaatttttcctattaaatttaattacaatttaatctttaattattaattatttatttattaatcctgtataaatcatatgtcttttatgagacattagttctaacttttctaccatctcacttatattcagttaaaagaaactaaagcagattttagtatctttccatccatattgaccaaattgaaatgtgtagaatcatatatgctaccaaaatttattataatatctcctggttgtcatctctatatattaaaccaaaatatgtgctttttctaagcatggccaaattatatatgtatccaaccaataattacacatttgccaaataatatatgaaacaattttttttacagaataatatatgaaatattacaaatatcaaaacattacattttttagagatataaaaaacattaaataatacattctatttatttttgtcattatctgaatgagtaaagcacaattgaaaaaataaactacagttataatcattactaattaattataaataatacgtataataaaatttaaaaaattagctgataattatataaatgtattttcttactttttcatccttttaatattattttatcattaattacataaaaataatataataaattattaaatatttacttgttaattttgaatgtattattttatttgtacactttagtatcttttcaacatttttcccttactgttaaaaaaaaaagaaattttttcttagactcttggtatcaccgacaccatttcactgtcatcacagcttcttgttactgcagccagtatttctcccaccattatcattgcttatgattaggagtattatattccttatttaattattttcattgtctcatcgttgttgctgattgtcatcgatttcattatcactgccatagtcataagtcataatgagtaacgacccttaaattactctttttttataaataaaataaaataaaatagtattagtttctattgtgtttatatgtttttttagcttaaaactctttgtttttttaatataatttttcattaatttgtttgtatacttttattcatttgaatttaatttatatcaatgaagtgtctgtccgtataattcttttattttagttcatatttatataattatacttattaaagtatatataatttttatgtgcaaagaaaagcctcctcacgttatttatacgcgtaatctgtcttaaattttcatggacaattaaggctaaaaaaggtcactgctttagattaatgtaagttaataattaatcacatgtccaatttctatatttcgcgacatttttttctgcaattaactaaatatacatgcctagtactttaaccaatttttggttgcaagtacagtctggcatgggattttagtattgtatgaattaaagcacaagattaaaataaactttcttattttatgcaatgaataacctcattgttgatatttacaataattattatgattcccctgtcgatcaaaaataaactaatttagccatgcatatattgtcgtgtgattgtgaaagcatgaatacagaaatttgaggtacaatagcttgaaagattgggcataatgggatgattccgctgaggctgaatttatttttccaatatatagcaaatgtccatttatattttggcttgtgttttctttaatttttccctcttgattgctcatcacgtggagaaataaaaatacttggtgaatccgagttgtttaccaacaatggagttgtttacatttgagtctaagatatgattttcatctttgaaacagcaattatttgttgtcatgcatgtggagcgcgggtctaattaataaagagtatggattatactggatctatatcaagtatggaaggtgtgtttgttaaaataagttaagtaaaataaaaggttaccacactttataaaaaataaaaaagttagtgtcacaggtttagattttgatccttaaaagagaaagaatttgttgtaatgtgaagcatgggttggataggaaattaagtgcaagtggattgagttgattctgtatcaagcataatataagacatagtattgttcaaaagatttcaatcaatcaaagtcaacttttttatgtttatatatatttttatttatgggagactttattacatcggttctcgaacacctcctcaagactaataactgaattagttcagctatgacaatgaatgaaggagggaaacgacgtggtgccatcgtgggaaattgcttacgacgacaacgcacgacggaggaggtttaatccaatgcagtggatgtacaatgaaaaacccttaaacctagatgaatctaataaaataaaaataaaaataaaaattatgtatggtttagattgagattttcttgttacaatgtaaaaggaaatggccacagtccaaaggaaaaattattaggtagtttttaactgtttgtaattctaattagtctgttcataatatgcatttaagtttttcatttaattatttttaatattatttcatattatataaagattagctaataccataatagtttttgactcttaataattttttgatatctagttgtcctttctgtttgtctattctcagattcgcatgtttcttcaccaacctaaatgcctattggggattatttttttaataagcctattggagattaattagttccaaattaaatgcgataatttccctgtatcacttttggcatatgcttcgttctgggaaactaccagcatgtagtataatattagagtcgaatatgatctttttttcttcttgattcagttatgcatacacgtgccaactaattcgttttgttacgtgatatttgctatatgggaaatgttttaatattttaaaaaatcgacttctcaatacattttttccctacgtaataaaaaaaattgacataaaagattattgaaagttttaatttataaataaataaaaacaaactttctcaaatgattaattatcaatattattttaatgatagttaaataattaataattgaacacattttataaaaaaatattatcataatcttaattataaaaatattttaaaaaatcctaataaattataacatttttttctatgccaaaatgaatttttaaaatgatttttttttacatcaaacactgctaagtctttacatataatcattactggacttagaaaatttaaaagtctacatcaaagacttttaaatcttccaacttgtagatgtaccgggttccattataaaacataaggataaaataggatcatccttctcactatagtacaattaggatgcaattttattgatttaattgggcatacatgtgccaactaataaaaaatatgttaaagtcttatttatttatttatataggatgtcaaagaataatcgtacatttgaattttaaattttatcttctacaattaatgaatcctacaactaatcataatgactcgttatttattaaattttttgttatttttttctttcttccaaacgtgatcatattttattactctacgatggatttttttttttcaaatccacttattaattacctgatattttttcttatggttgtgtgcataagtgtgatttaattcaactcaccttaaaaaattcactttcgtttgatcttgtgttaaaaaattcactttcgtttataatttaatgttactttttttcattaatgtataaatttttttatttaattacacattttattccttaactattcaattgtgagattgttaattttatttttctttagattttaattgggcgaagtaagttttttttttactatctaattgtataattttgagacatgtaatgtcacatcatgatacatcatccaatcctacatcaacttgaccttctattaaacttgtaaggagtgtacacccaaaaaattgatttaaaatgttgttcattttaacttttttgagagatgaaaattaatttttttaagaataatattgaaattcactcattttataaaaaattaaaaatatatttaattctaagaaaaaaattataaaaagttaaattttgcttgcactaccccttaagagtttttaatttggtagggagaaaataaaatataaaagaaacactacttacatggataacaatgatttttgttttgtaaaaaagaaaaaggaaaaaaaattaaattataaaaataaaaaatcaattccactatttttttgttttacgttttgttcaatttaaattttaaacttagatgatagttacagcacacatatatctttatttctgacagtttaatatcatgtcaatatttaaaatttaaattatagcaaacaatacttaagtaacaatatttgaaaaaataatcatgagagtttttatgagtaaatgaaacacaagattaagagaaaccacctagatcactgagaaaggtaataaaataattagtatattacgagggaaaaaatttcaatcgaatatttaacacaaacatttaaatttaaaatcaagatcattagttaagttaaaacaatattaagtaaattgaataaaataattaatagtataattttatttatattatcaattgattataaatgatataaccagtaatccattgcttactgaatttctcatcatgcactccgttgtggatgcaattaattatcacaactgtttatccctaaaagcaaagattaactgaacaagctgataaaaaaataaaataagcataattattttaacttaattaatgataaacaattttgtgtatgcatgaaactgttttgaatattttttttaaaaaaaactttattgttcaaagataatcttattcgattcaaccaaaattacatcatcatgtaaaaaatacttatatatattcgttaaaaaaatgattaaaaaaaactgtttcttttaacaagcaaattatgaaggtgtaaggactctagtagagtcaattttactcctatagcattcactagcacaaaatctcaaattcttgaataataactgattggttggagctggtatttatgtcatcagccaatgactaaggagaaacattgtttttcttaactgcattaactttgtaacaatatttggatttggattttgatgtatgtaaaaggaataaggggatttcttcataccaatttttttgtctttttctttgtgtcatcatcttctatatctagatgttcatttttaagtcgttttattaattatatgccatcaataccaacctaatggtctttctctccatttgtcattacttatcaaaagtacgattattccctgtcatttatttaatggtttgaatttttaatcatgaaattctagaacataaaagatactacaatacccaaaatatgattaaaatcaaaatctgtcatctcgaattaatcttgtttgtgagacacgacttataactgcacaagttcaatgttctttaatactctttaccctcatttcttttcctttttctctctcctcctctctagtaaatcttattactagtcttggagaaaggaattaaaaatgaaagcatacaatggaagatttctgtgtattttcatgtactttaactatttgtaggtaacaactagttagagtggaacaaattagaaatgatcaagttttgtaatatatagtactacttggttgattgctattggagatagagaatgtgttggcaaatgttgacttgattaagcctccaaataatgggttgctctgtcaacaaacccttcgctccacctgtgttgtcgcagttatttggtcattttcagtgtactttacgctactttttacaacctaatcaatttgtctaccctagaatgccccgaatttaagttgtaggtgaagtttgaagattcttctcttatatctttaacgggcttttgcataaaataagattttgatattaggtaagaaaacaaattatagatattaaaatactaggtgacggtttaaatatatatgatcatttgcaattgttaagtatggtctttaattaaatggtcacgacaaagatttctgaaagtacctgcaaataaaaatgtttaaagatgggccattcagagcacaacgaaaaataatcatgtttcatttgggatttttgaactgtggtatacttatttttatgaatgattgattaatgccgataaaattgacaaacaatgatacctgtggtacaaaactaagtcaacaatttccaagttggtacccttctagtgaggtagaagtagttaagttatcatttaggaatttcatgcttggtttatatatgtttatttatttattctcatttcaagtttcaactctttttttggcataaattatgatcatatactgcacaatcacaactatctattgcattatatattagtctgcttgtgcactatttcaatgccaaatattctctcccttctgtgtgtctgtttgttctctctttagttcatatctatgctagggaatccactcttaccattaaactgaaattgtgacagaaaaaaggcaaaatggagagccagccactagaaaaagcaaaaccaaaatacagaaaaggcttatggtcacctgaagaagataataaactcagaaaccatatcattaagcatggtcatggctgctggagctctgtccctattaaggcaggttagtccttttttattccctatgattcattatcactcatatcagtagcatattcatgatgtatacctattacctaatacctagtaaaggttcattattcttggctcttatggtgtcatatatcattccttggtttctcttaccttgaacttacttaacttcagattaaataaccaagtagaaactttttggcactaataaatttgacatatctagtcaaatgaattaatagttaagacattatttggctgaatcaattctaataactttgtccaatcaattccaaaattagaaaaagggtgaaatgtggttaaaagttcagaatcttcattgtgaaagactacctatgcatttttcatgcttctgatttgcaaacttttatattttatgaccgattagatacgcattttgagccaacattatagtaaaattcaaaatgttgaatttaagaagagatatgatgggtgttggttgtgaataacttttaattattcgttatttatgtagtattcatataaggtgagtttctatttattttatttgatgttgagttgctaactaacttcacttaaatatctaggcttgcaaagaaatgggaagagctgtagactaaggtggattaactacttgaggccaggattgaagagaggggtgttcagcaaacatgaggaagatacaatcatggtcctacaccatatgttaggaaacaagtaagtaagcaagcagaatattttttaattttttttaaaattttaatgattttaagtttacttgcaagtttgaagttaattttgtaattgtggtcagagtaatgatacagacttagatacccaataagtagtgcaaatggacaagtcaaggcaaacattttttttcttttcttttttcgaggccttgagttaaagaatgcaattggataggccagttagctatttctatttaactttattttgcagaagcaattgggttctatttaaatagtactaaaaagaaaaatagataagacgatcaaaccatgaactggcatggttagcaacttccatttttaaaggagggggagaagtgaatgtacatagaaaagacaattgttctagaagtctttattttttttaatttaaattaaatcttccccaacattaattgttttagacgtctccatcatatataattaacaatcggtttattaaatatgttgcacgcaaatatacctaggtattctttcctcatgtttgttttggtatgaaatgcggattagtattttttataattgtgaagggtgtaaataaagatatatccactattaatttagttaaaggacatcatgatctcaatccaataaaattcaaagatcaatataactagtgctattttgaggagacatttcatcatgatccatgtttgacatcttaattgcttataactcttcaaaaccaaagcttgatagattaatcaatagttggcattttctagctactcattttccagtgtacactctttgatttttcctatttctttgctataatattttttttattaatggaaaattctgaaaacaaattaaatcatattggccaggtggtctcaaatagcacagcatttgccaggaaggactgacaatgagataaaaaattattggcattcatatttgaaaaagaaagagatcaaagccaaggaaatggaatctgataaagaaattcagcatgctagctcaagttcagacacaatggaaaactcactctctcctcagaaacttgcaacacaagatccaagttatagtttgttagaaaacctggacaaatcaatagcacacaatgataactttttctcacaaagctataacttttccaaggaggcttgtcagagttccctaccattaccaaaactcctattttctgagtggctttcagtggatcaagtagatggtggaagctcagtgaattctgatgattccttggtcttggggaatgaatttgatcaaaattcaactttccaagaagctataatgcatatgttagaagaaaactttggtgaagagtatcataatagtctaattcacagttcaaccactgaggtctacaattcacaactaaagtcaacaaatcaagtggatggaagtgacttcatcaattgtattcccgggaatgagttgtgtagcaatttcagcctaaccaatcatgctatgtaaaagtactattacaaggctgttcaaaaaggaagaataatttgtaattaaacatacagaaaacaaaacaaattttagcaatgtaaagttattctgcaaattgtttgaattgtactcctacccaactcaaataaattcagtaagatatgaataaagtgtatttcattgtgattcttctggtggtgtttagcatactcaggtaaatttgcttcaaatcaaggagtcaacgtagcaaaatagtggcatgtctcattcagtttattccttcacaatttctcagcacatgcttagagccagatgcatatgattcagtccttgaccgtaagaccttgaccttaggaacagttgcaaacttgcaaatgatttaggaaaaagaatcaattagtgagaagggtaaaaaagacacaggaatcaaactaaatcacaaatttcaagttattttcggcacatgtatgtcaatatcacagcctctccagattgttaacagcatgaaaaatggaattataatagcagaacatctcaaacgagaattatgtcaacaggacacgaacggctaagccaatggtcaatctcaaacttcaacatattaataacttttacctaatcacttggttcctattgaagttagtctactcttcacataacatggtgatgaaagaaataacttttcacccatatccttgcttgactctagtttttgtttttatttgactaaaatatgtttttaatatatgtaagtacgactcaatatgattttttctctaaattttttcggtattttgattttcataaattgattttttattaaaataattggcattgataacctgcatctatttatgttaggttatactatgttatatcagaataattgctaatgtagtatgtatgattggatatagaccacatcactgttaagtggtgacaaaaattatttttaaaatttttaaaagaaaatattttttttttgaaagcctagaagtaataaagccatatacagagattttaaagatatattcagttatttatttatttctaactagttcagagagactgaagttggtcaatgacttcaggcaacaagtaactaatgcacagattgaataatttaatttctttatccacaaagtagttggtatatacacgccaatgtgtcaggtttgcacacataataaatgaacatgggctaaatctccaacatgtaaactaaaaccacacttgtattaatgatatttaataaccaaagatacacaataaaaaataactttttctttccccacaatgcttgagatttgaagcattagaaacaaccaaggagtttctttggagctgttccagttgctctatactttgcagcttgttcctctgccttaagaagatcttcccctttctttgcctcaattattgctcttctttcttcagcttccttgtggattgcagcaattttgttttttatcttttctgcagcttctgcctttttcttctccagttcttcctatcagatacaaaaaataaaaagtgaactttaatttctttttctctttggccagattcaatgcagaaagaatcacaagaaaccaagatttgaaattacacgatagaagaaaatgaacacataaaacatgatagaattactaatgaaattaattcttacttcaatctttttcaggtcagcctccacagcagctttcttgctgttttcccatgcagaaacggatgaaagctttttgtgagccctgcacaacaatttcatttaaattggtttcctagacattgttgacctcaaatattcataacatgtgattaaatatgaatctctgtggtttattttctagttggaatcaatatttagacatatttgttaccaaattgacaatgatggtgatacttgacaatgtatgatactatgaatctatgatgtatattaggctccaagagagttcaatgtgcaaaaaatatcaaagatcagcacaagataaacaaggaaaccaaccaataaattttcagataaagcttgatgttagattgagcatttttagataaagcttgatgttaggtcgattaatcaccatgattaaggtgattcaattgaagattctagcttctgaaccaaagagtgtagactcttacttgttttcagcttttgatttttcactttcttcccatgctttgattagtgacaatctcttctcagttgcaactcttgcaagcactgcatctgaagacaaatgaggcttaatgacataatctgcaatgtcaataaaaaagggcacatgaagagaaattaaacatcataatgacaaatgacatacctcggttgacagagccctcagttggtttcacttcggcaacttcttgagtctctggcaataaccaaattaacaacaataaacaaacaaaaacaaatgtggagaccgaggttatgttcatacatatgatgatgaaacataaggttatttttgttgcaaactattgttggtctgttactatatgcagggtccgtccaacgataaacaaaacctaaaacaatttttaaaagaaattttgcactttaaatacgttgggcatttttactaacatatgtggttttctttttatcagtatatgatgaggccttttttactttataagtactaatatcaaatagttttttgctggtggacctaaagcctacgctttagttgctttacccttatgtggtccctgtttatatggcatgtaacatggttccaagatttaacattaaaaggaaatcaatccctcacatgtgaatgaacaaaattcattctttgtatctcttatgaaatgaaaagaaaagtatggtatttattttgagaatgaaataattccatttgagtacagagtacttatgcaacagaatataaatattttgctctaattctgctccaatcaatcattgaactggaaagctcatatttctaattagttttcgttggtaactctgttttaatcaatcctctaagtttgtgtgtggataaaatttttaaggaggtaactctgttttaagtcacatacaaacaagcactatgaaaatttgaaccaacacaccaatgcatcgctacaaactggctcaaaaatagtaaaactcagaaaaattccaatcataaggcctactgaagttgtaaatggatacaaaatatgggtaggtttaaatttgcgggtactttggcgtaaaatatgaaaggtttgaattttgcatgaaagctagattcttaacaagcttgagattaggtgataataatagtttaaaaactttatgccaaataatgttgtacaaggcttggattttagagaagaatcactctgttcgctaatacaagtggaaaggtgcagagtaatttgagaataatgttttggattgaactacaacaggaaagttccagcaaaagtgaatatgaaaaaatacaagaaaacacaaccaagtacaagtaacaactaataatcaaataaaatgagcttttttctctccaaaaaagtgtcagaaaataataataaaaaaaccatcttctcagaaattaatcaattctaacttattgtttgtaactatctaagagaaaaacaacaaaaatattttgctgctagaagattcttctgaggataacaaggaatatggcacgaaattttcagaaaaatcaagtccaaaaccagtgagcaaccatgtaataattaaaaagaaatttcaaagaagctaaaggaattgtcaataagaaaatctctcttttttttctcaaacagttacaagatagtaaaattaaaacaccctttgcaataaagaaaacacaaattaagttcctcaaagaataggttgattaaccataacggattttttttattttaaaaaacaagataaataaagcacaaaacatatgcagagagaccccaacaaaaaattgcacacagatttcaattttctttttctttcttttttaatcctcaccaaccatatatataatccctcctttgggaacatgacaacacaaccagaatcagtattataatatcttactctcaactaagacaagagccttggactcatcaggtttgtcatcagaagaaggcactggaattacagatttctcctcagccacatcctttggagcctcaggaacatgttcagcctcagcagctggaggagcctgtgaaggagcagcagcaggtggtggtgtcactgattctgactcagccgttttggtttgttcttctgtcatttttttctcctatgaaactcagaaaactctggcacacaaaagtggtaaaacactaaaaaaaggtgtaactacactttcacttatttaggaaaaaatcaacacttattgtggagagagtcagagagagagagagagagaattgagaaaaaggattttgattggttgagatattatagttggaggaaggtaactgcttaactctaagttccaaaagcttagctgggtgttaggtacttgtggcctcacaatgcgttggcacagtaacaatatatagagaccattgaggactaggaaagctacacatgctaacaatttatagaagcaaaagtaataaaaaggataaacccaacaaagtgctcaatcaccattctacacctgttcttggtgggtcctttcattaatttcttcttgatttcattagtgacatgatttccccccctaccagtttcgatacattgaattaaggaatagtggtaattttaatggtaccacgggtgaatccaaatagagcatatatggtactttggattaaaataaaataataataaaaggttgttatgatatctgattttttatttaattagattcatggatttttcaagacagaactgaattgaaccggataaatagtgattcgttatatttttagttgtagcattgttcatgaatttagtaaattaaattcattaaattattcataaatttttactagttcaatttatgtttgagtttttaaataatttttcagctgacagtttattaccttcaaataaggatgcactgcatttatttatgataatcgatttccctatgtgcttaccctaagatttgattcgcaataagaaaagtaagaagcatacttcttccaccattgcactaacccttaagttctaactttatcatccacacttaattataatttattttgtagttgaattaacgcattaatatttttgttgtcaatttggaataacttgcttctgttcggaagatgttccttaattcctgatcgttttgttagggaaagtaatatatttaattaaatagcaatgaattgttgttactcttttgtgtggttgattattcacgccattgtaggcaaagaaatttgtgataaatacaataaagtaaaccaacattatttaagtaatcaccctcctaattaatctattgattgatgatgataaattgatcattcattggtgttttcggttacatcacatataaattaacacataatataacgtgctctagcagttttaaacgttgccgtatttgaataccttgcaaaatgggaaattttcatctcaaaatgttatgatcaagattccttcatatcgtgcacacaacggaatctttcgtgtgagcccaccatgtcaaagactcgaaggaaaattcatcatagctatacccgcaaaagacaacctcatcatgtatcccaatcggtctcaatcaactaagttggtttcttgctcaacttgtgaaatcttattatcgaagctttttttttttatatatatattttagatttcaatgttatgattttgaaacaaacctcacctagatatggtaggtttaaaggatgagcttgcttttgatttatcgcaataaattaagttgacgttctttgtttcaacatattaaatttgagaaatcctttggttatttcatggccaaattaattttagttaattgaaaataataaccattcgattttgatatatccttccaaggaaaaaaattatgtatgaatgatgtaaaaagttttacataatcattcaaccataattcatataagttaaataatttttaaaataagtatcttaaagtaattcaaataatgagattaattattaaaatggtgttaattgtaagaaaaaagtattttttatcaacttaaaaacatatttaaaattgttataatatgcataaaaattgttataataattaggtaaattataaaagtgttttaatattttccttagaagttaaaaagtgtttataaaagtgttatacaataaaagtcatttttaacaaaaacaagctcacactaattttaaattttaactttgaattgattattataaattaaattttattaaattaacaaattttcagtgccttaaatattttctaaaataaataaactcaatttttatgccctaatacaaattaatgttaactgaggatatctaatttagttggttgaacaaaatatatgcataagttattttattcaaaagataataaaaaatgtattttttctaaggtcgtcatttttttttacctttttttccattaaagctatatggatggtttgagaaggaatacatctaccatctaccatctaccaagggacgccgcttatattagagcttaaaaaggtttgatattcttttaggatatttataattcttccgaggaaaaaatatcaccaattaaaaataataatattttttctttttatagacttaaccatatcacccttgattttgttatcaacgaatattgttcattattattaattaaacacgtcaagcaaagtcatttttggttaagcttctcttctcaaaaccattatccagagtgcaactcacagggctcaaattaacatgtcatcccattcaaggtgtttgtgtgtgtgtaaaacaagttgtattgcttttaattttacttatcatgtttaatcttgggagattttcattttaaataaaaaaatcacttgcaaaagaattattatcttatgtttactcagataaccctttttttaaagatcttaattagtgcgtgtttaggaatgcgtttaatttagacagacacatatatccttttattttcacgtcaaaacattgtattgatagagaagttaagattagttgcttcataaaattcatgtcgtgttacattgagaatcgtttccaaacacgctattagttaacccaaattaatgctagctcggagattttggtaaattggttggtgaattcatgtttatgaaaaatgtaaatatgatgtggggctggtgttgcttcccccaacctgcttcaacgatttatccacttatttattttttatttgatgagattatgtccttattcgggtgtcatattcaaattggagtagaagttaaagtagttttcttatctttttgttacctcctcttgtaaaatcacggaaacaaacaagtgtaatgtggacaccaagtgtgatcctaaaccacgaaaactaaagtgataatcaaggaaaaaaaaatggatgatgtgggtcgaacaaacaagtacaaattgtgaaattgaccgggaaattgtcactatatacccctttgccttgcaaactgtttcagtgagacaaaaaacacctgtttgctcattccatgattccatccctttgttggtattcggaattgcacatgccatgtttcattagaatcttgtttggactagaatcttggagatggtaagattcatttgtggccattcagaatagtaagatgggataagtaccatttgaatttgaactgagacttttaagccaccaaaacaaaaatatatcattaattggaaaaggaaaataaaagaaatggtagcataaatgcataataattcgatgtagagaaatttcacccttttgtattttgagagtttggtgtgtttgtgtgtttttgttaatgatattcataaatatgtgctttaaaaaatgttagaaaaataagttaactcttgacaaaacctattatcattagtatttatacttatttgatgtttctttttagtgacttttcttgaaggatattttcaagtcagttttcatgtcaaatattgaattttttttaaagccaaaaggaaggtgtgaggaggcaaagctactaggaaaggcttcccaactatgttgacatttccaccccgacaacacctaacccacacatgtatcttaacctaatgaggagcccatttcagcaccaaaggagcttttgagaaatgaaaatagttggagaatcccaccatctataacctaagttataagcagcaaaagatgcaagcttgcttgcacaaacattaccctctctctatatatgagacatcctaaagtttatagaattagtaaactttatacaatttaccaatagttatatatagaccaaggggcttataagcatggaccaatagcttggaatctgtttccagccaaatccataaccagtttacagagatggtcttttccacagcaataatggctgccataatctcagccatgaaagcacaattaatgccaatatttgcaacaaaagctcccaagaattgcatattgggctcataaataaaccgtcacaacatgctctcccaggattccccttggctgcctcatatgtattgatttttatccaaggagatggtggagctttccaagccacagtggttgtctttctaagtttgacatctccactccaaataaagttcttcatccattggccactatctttcaagagatacttaggccaaagataaacatggaagatgtatgtgagcatgttgtggataaccgatttgtcgagcaaaattcttcccatgaaagaaagcaatttccctttccaggctaagagcttgttcttgatgatgttcacaataggttgaagatgaattttcgttccttggcttcccttggaacaggggaatccttaaataaataaaaggaagatcctcatgcttgaatcccaaaatatttgataactcagaattacggtgctgagatattgagccagaataaaaagggaatttggctctgtttatgacctgaccagaagcttcggcatacctgttaaaaaaagacataaggttcctgatgttcttagtccctctaaaaaaaatgataatatcattcatatttgtccaatgtatttagaagaattaattaatttctttaatattgatgcatttttgggtcatctcttttaactattaaggattgttaatgaacttttggattggtttaacataagtaaagcctgaggttcattaattaattatatcaatatagtgcaagtttctcatagggttaataaatatgctagagatgataaccatgatcatgatgacaatcacgtgataatggtggtagtggataatcttagtagttgttgcaacaacaaccataacaattatggtaaaatcaatcataaagatgatagtagttatggtgatgataagtttaagatattttaggatatcatacattaaatatttattgattttttgtctgataaatcttaaagattttatagttaaataaaattttaatttgaatctaaaatattttaatatttacatttcattttaattcaataattgagattaattattcttatttgaacttctttgaatcttagtaattttgatgtgggattgtcatgtaaccaattcttttttgatgtacagttcagaattaaataaataaaaaaaaattcttcatcctctccatcgattattctccttaaatacagcaaaagttcttctcatttttatgatcctgtcctttgcaacaagacctaagttatctcaattcttaacagagtaaggatttttttttttttttctgtttgtaatttaaggaaaagaaacatgacgagtgaatgttgcttccactttgtcacttgatgcccttcaaagcaaaaattattcttcaaagtaatttacaagagtacgcttctgaataaatataagcaaagtttcctaaatgtaacaggaatgttcaatgcaagcacaagtaacaaattaaattaaatcaaaaagtgcaactaagatttaccttggcttgcttataacttgtgccatgtattcaccttacaagcaatcattcaagattttgtcaaagaacagtgatatatgttttccttacgaggatataatagcaatcttttttgtgcttttaactcagaaatacaatagaaacaatgtatagataacctctcttacatttcaattgatgtattatggataagttttaatggaaatcaacctctctgtatacaaaaaataaaaaatgaaaatcaacctctctgaaaagatctgttcgtacgtatatatataagataataaaatgctatttagagagtaataccacttgaagtcttacatttgttcaatttatttattgtgagtgaatccatacctttaatttcgattattttaagcgtcaagcataaattgtgcattttgaagttagtacttttatttcattggatgctgttctacaccaatgactcaccagtttttttttttttttttaatttagtgaaaaacatttatagtatgcatgtatcactataattgtagagaagaaaatccacatgctataatagtcatcgaagaactaaacattgagatgaattttctcccaagcaacggacaagctagttagcatagccaattaattaaggtttgaactttgagacaccctttcccaaattatttatctctgctttcatactcgtatatacgaagctctacaccttaacttcatcaaataatgaataagagaacaagtaattaccttaaatctcacacatacaatatgccaaattaatttaataaaaaacaaatttttagtccctattctttctaaaaaataaatataaatttaatttcttttaacttggaaaagtgataaattctcagagaagatgaattaaatccacataagtttgaaaattaaatttatcaaacataaaagtataaagatttcgtgtttgcctaaaaaacataagactagaaataatatattaaggtgtataactaagactgaaactttgatattcgaaattggtgtataacaatttataattaggcgagatgacttcttatgattaaattggaagattctctaaaaaaaagagactaatggtccccctcctcccaactaatgttctcaaagtcgaaggatttggatcctcaattcccacatataaacattaaacaatgcccaaagagatgaagaagagggtgtatttttagctatccatttataaaaaaaccgttacaaacattacgagggagaaaacattatagaagcttctctctctctctttaccttgcgttggactaaacatctattaagctttactcctatgaaaaattgaagacacctgaaatttttttaaaaaaagataaaggaacaatttagagttttcttgtacataaactacatttaagaatgggtagagactaaaaaaattaacggcaataaaattgcgtttcgcaatagccttgaaagtgtttaaaacttatgcgacggacgaaatattgtaccttgtttaaaacagattattttttttagaaattgaataatgagatccaaaatatagcataattctaattgagtcctttatccaatttgcgatggcaacaaattacatatgaacaattagctgaataaatcataaaataatttgatttaaacaatggggacctgatagaattaataaaatttgtttgttgtgttcctgtaaaaaaatgaaatttatttgttctgttgtgtatttttttcactcccaccacatgatggaaatataatttaattgtatattttgtcaacagaatgattccgttcaaagagcattttcagaaaaaagaaaacttaaagcaaacataggggtctaaatagcatattggaggtgagaatagcatctccccaataagatctgttcatctttcgactgaggccctatattgaaatttaaggctcttactatgggtaacatgaaataatataagaaaggtcaaaataataaataaaaaagacaaaacattgcaagatattacaaataattttaataaaagtaaataaaatatttttcttatatgttaccaattgaaaagttttatcatagttttaccgttcttgtaaaaataaatgaaagctttttttttttcttcttaaaaataaaaaaattaattaaaaatgaaatattatgatttttttctttcatcagcgtatatgccccttttctttgtaacgagatttttgcacttacaatgtaccaaaagaaaaatactaattagcgtcatcaacgtatttcacactagatattgttgataacagttacatgcagaaattggtttagtcgtttaaagtggccattcaaactagtttttgtcttttatactaaaacaatataattaacgaaaatgttctttaacgaataacggttatatatgtacggtttattggattcatagctgcatctcatgcaaactcgaaattgaacatgcatttaatatttttgtatttgataatacaacattttaattattaaagttcgttacaatttttttttcataataaagtattatgtattatgtactgcagcatgatgatgatgaaattattttactgctaaaattgatcaatagttaacattaaaacacaacaaacaaattctctctaacttcgaatgttaatatttttgcataaatgaacaaaaaaaagtgaagttattaaactatatatcaaatttaatattacttttttttaaagagattctagtgataagaacgatacgtaaaccataataattaaaaacataataatagagaattaattaattctcaagaagagttgttatggaaattaaagcaagatatataagaaatcaagagaaagaaaaagaggtattaaatgaggtctccaccttcttcaaacgaaaaagaaaagaaagtaagaaaaataccaacagtgtcttaataatgtgcaaagtccaaagaggatcgaagggaaaaaggttggtcccatatacaattaaagacaaagaccagcaaaaagagtttcttgacttaaaaaagaaaacaagagaaagactagagagagtttattgaagagtacaaaactatccagttctttaactaaataagatatataaacttttggttaaattgcaaagtaatttacaatttagaaaatattgtaagaattgcagtaaaaaataaaatattttaaaatagaaattaaataaaaaaaagtgtataagtttaaatataaaaataaaataaaaaatatagctagactctgtacgtatatataataacatgctggagcacctagtcttataagcagaacgagcacccaacaaacctgaactatctttttatattaattataatttcattaattttctaagttatttaaaatcttgtgtttttcattttaaaattgtaagatatagctataaaaatataaaataaaaaaataatttattaaaacataaaaagtcaagaagcatatatatataactgttcacaaataagtgaataaaaattaaatgaagtaacacattaaaatatttcaaaaaaagtttaaagaaaatgccatttggaagaactttaattaatattatagataaattatattcataatatatatatatatatatatatatatatatatatattgacattaactggtccatatgagaactttacgcgtgttagatgtcatcttcaatcaccttatcagtattgtccaaaaaattggaatacatgtgaggaaaacaagtagacattttaaaggtgtctctttcaaacaagagaacaaatattaaaattaaagaggaatatgcatgctttgtagactaccattaattaatctgcaattttctatatacatatactagctacttgcaagtgtttaatactctgggcttggctaagagaagagatatttgtttggaatgtcttaacaacttaattatcttccatgtgatggatcttgtaaaatcccattgaggatgagcatttgttctaactctaagtaaagttaaggctaaaaaacaaaacgaatatattcttaacttggaaatattagactgaaccaaaactacttatatttttcttgaagaagctatggtcatttatttaattaaggagcatgcatgcagttaaatatctcattttaatatttttactattaataagttttcatgtcaaaccgattaaataataaaggtctatttttttattaaacaggtttacatataatttaacttaataaaaaatattaaaaaatatagacctaacattaatttatcttaagtctttggaatgaataagtaaattcactatgcataaaatattaccccttgacctctgacctcacagtccatgttcataataaccaataatttgattgcttttgaaaaggtaatttaactttataatttgttggaaattgccatcatcatccattatgcaaattaaattgcaaggacgggacaatgatagaacatgctgttgtggccctcaatgaggttgcaatatggagaaatgggacaatttctttagacaaataaccaaaaaatagaggtttaaaaatgtagagaaaacttcttagatccgtttaaggggtaacgaaaaagaaagaaaaggagggtgattgatttgggaaaaagagtgaggataagatccaaatccaattaaaagaagtttgacaatgatgcttactgtggagttgggtactgttataagtagcattttaatgtgtattgtaatggataaatatttatttttatatactcagaatttgcatgtaataaataaatatttaaaatatatcaattatattataaatatataataaataatttaatttgtaatacaagattatttttgaactaaaatagataaacaattaaggaaagtaagtatataaacaaagataaaaatatttgaaagaaatagtttttttatcaactgcaaaagagtgtatgaaacagataacaagaaaagagagtattaagaatatcaaattgagaagaggagagtttcacacctaaattgagaattattttacatttttttatgtagagaattatatattaattttacgttagagcaagatggaaacagtaaaactatcatcattaattggcgtggtgaaataatgcaccgaacgatttaacacgagttgttataaattttattgtataaaaaaaaaattcgattcttacgtattaaaaataaaagactagcattaattaatgattgacggatatggatcgttacatacaatacaactataggaaggtctaataatttgattgtagctacgtggacaaggttcattgtcaatataattgtacctaacagcttatatatatatagacagaaacacttgtagtatcaagaagaagttttgacgcaatataaacttgttatttaaaattaaaaaatataaatgagaggacgttttataaatttaatatatgatatcattctaaaaatggattaatagaagccataaactaatttcgttagcacctgtaaatttataattatatatgcaagttatataacaatgaacttagaaatttgaagaaaggggaaccattttactcactgatcgagtcgttgcatgagttaggtgctgcctttatttgttggcgtggtgtaatggtgttgttgtttttcttttctttcctcttctctacttttctggaagtattgctgtggtgtttttgtcaaagaattaggacgtgacgaatgaatacacttaatgaattcagaatctgatgataataaacagagaacaattaataatttatttaagatccattaaaaacatcaaaattaaattatcaaaatgattaaaaacaaacttatatagttgatctatcacttattttatggattgataatgagtttatctttcatatattttttatgataagaatcatgcataataaatatattaggtcagccatttgctgaaaattattttggtttattaaatttttttttaataaattaaccaaggtgtttaaattaatgttacgtaagtttcaagttttctgtatcaactttttgtttattggcttactcaaatattaatgttttataaatacaaaattaattattgcaaatgttagatttatcatacgattcaagtttatacagtaaaatatactatcatttgagatatatttcttaagttaatctcaagtaaattgtaaacaatctcttcttaattaatttttctagatcatattttctttttcatttttacactcaattccttaattttttttcatttgatcttcttttttcattctctatcttctttaatgttacactatttattttaataaaattatattcttaatatcatactgttcatttccattattacatttttttaagggtaagaaaacaaattatttattatttcgtttgatctttattaaaatatgtacactatttattattatttaaaaaacatttttggctacaaaaatacatatgaaaagtcataaatatgttcttttatacattttaaatttatttcctatgcaattaacaaatttttaaaatttccaattcaataaacttatttaacatttttttattttaactaaattcttttttcagagtttagttgttttattgtccaattttaacaaatataattaaagatagtttcacacttaaaaattaaaataacgtgaaaaaatctattagaaaagagaaaaaaaaagaagtgtttgaatttgtttaccatcgaaattaaaataacgtgaaattattttttttttatcatacgagtatacataaagattttggtagaaaaataagactcacatgcttgtcggctgtgtgtgcacaccaaaaattcaaaaagaataaagagttgtcggggttaattttgtcattttaaatttcctcctttcttattcacaaagtactaatgaaaactgaaaaagaaaaccatacgtctcatctttgttccttttatttatttcctcttgccctttgttaaactttgttttagaatgtgttatggagaagcttttttatatcaaattcatttttgttttttagtttgctaaccatgcaagttcagtacaaaatctagcatctctttgctttcagagaacccccatacatcactccagtgattaactaaatctatcaaaacaccaaatcaaagtttcaaaatgaacacagtatcccccaagtcaccaatgaggtgcctcttataaaagcaccgtctagcatctacaatacaagaactgcaaaattttgttagcctgaagccatgttcaagtcacggagcaagaagaacaagattaaagctgtattcaaactgcaatttcaggcaactcaggtaaaatgaagcgaaataagtatttatccattatatactaaatgacaaaatgaggtttggcctagtagttacaaagttacaattgtcattttgtcatattgccaggaagtttgaaatttaatacagaatcacttatcacattgtagatttaggtaagtgagtttgataacttacttattgtggtgaatttcatgccaatgcattatttcatcaggtgccaaatatgaaaaagtcagtactgatggtagctttggtgccggataatgttgggaagccgacggtgaaattagagaaagttgctgtccaggatggaacctgtttatgggagaatccaatctttgaatcagttaaactcgttaaggacacaaaatctggaaaacttcaggagaaaatctaccattttgttgtctcaactgtaagcagtagatttaattgcatactatcttttacctgtctaggatatgttgctggaaagtctaatctctataggttcttgcagggatcttcaaaatctggctttcttggagaatcctcgattgactttgcggattttgctgcagaaactgagccactgactgtttccctacctctgaagtttgcaaattcaggcgcaatcctacatgttggtgtcttctattcccctccccacctagtttcttgtctctctatatcatgcacatgattacacatctttaaaaatatgggcttcatcagagctttttctttccattcatattccatattatttaatatcatcagattacaaaaaccaaatataattcctcaaataacatatgttgagacaggtgacaattcagaatgtggaaggggtacatagagatcaaaggtgaaaatgaaccatgcagccagctaatttagtttaatctctacaaatttccctttgtttcttgattttacttctctcctttttatttacctgttgcagcagtttcagaaatggggaagataattggaatggaagctcaagacacctactgagcatttgcagtacagatgaaggttctcataatgctgataaagtaaggtttcacatgatacggtggctttattcagctagcaatttctattgtacaaagttgaaaatttcctaaacagaaccttcttaagaggataaattaagaaaacaaataatcaatattacaaaatttcagtaactactaatattttaaaggatgagaacctgacaaagacaagcatctaatggcgtcacttctgtggcaacttcatggcaggattttccccagctattaccacccttgagacaaaattcaatgccatcaagaggaactattgaaaccattgcaacaagagctcaaatgcctcatatggggccaatgggttcagcatcagataggagtttaggtgactactggagaaaaagcctggaagatactcttcctcgagaaagattacaagagccttcagataatgtcactgagaacctcaaaagtgaagttgcttctcttaagaggaaagtggaagaatcagaacatgagttacaatcgcttcagaagctgatggagaaggaatgcagtcgaggacaaagtatgtcaagacagataatcagcctcagagatgagagaaatatgatcaaaactaaatatgagcaactcctgtcccagcaaaatgagaccaaatcttcaaaagccttacagactgagattgcagatgctagacagcagttagaagcaacaaaagaagagtttctttatgaaaaagagtttagttctaatcttcaattgcaactccagaagacacaaaactcaaactctgaactgcttttggcagtgagagaacttgaagcaatgctggaacaaaagaataaggaattgttggaaaataataaagagaatgaggatgccacagaattagatcacttgaagcagaaaattgcagaccagaatggtgaaatagacaattattacaagcaatgtgaagagctaaatgggcacataaaagagctcaattttgaatgtgaggttctgaagaaagaaaacctgaatatctctttgagattaaaacacggagaagaacaacaagttgtgttgcaaaataaacattcagcttctttggcaactatagaacaacttgaatcacaagtacagagattagaagagaagataaagaatcaggcagatgatttttcagagactttgatttacatcaatgaacttgaaaatcaagtcagtgatttggagagagaactgaaaacgcaagcagaaaaatttgaaaaagatttccatgctatgaaatgtgcaaaacttgagcaggaagaacgggccacccaagcagaggagacattgataaagacaagacacaacaatgatctcagatgtcagcgtttgcaggatgaatatagaagtctttctgttgaaatggcattgaaagtagaagaaaatgaaaagaagaccatggaagcttatgcagaagctgatgaatttcggaagcagaacaaacttatggaaaaaatgctccagaaatgcaatcaagagctcaggcttattacaaatcagaatgaatcaaaactgcaacagctcttgaaccaaatagattcaaaacaaaaggcaatagaaatgatgtcacaagaactagagattaagtccaaacaacttgaagatctacaaaggcacagggatgaacaggatgaggcattatcgaagcaaattcaattgctcagaattgaaattagaaagctgatggcagaggagcatgcattgtctaaaactgagtcaaaagagaacatgacaacgatgttaatgctagagaacaatgatgaggaggagataaggcttggcaccctaatgtcagaagtagaaatccttaagacccagcacaatgaattgaaacataacttgcacacggaacaagcagagaaagaaaatatgaagaaaaaaatatctcaattagaaggagagctgaagaagaaggaagaagaactaagtgctgtagaaaagaggctcaagaatagcaaaggacaagcaacagccacaaatatgaatttggcttcatggcactacgagagtgctgcatcttcttcttccactaaggatcgcaatagtatgtcaaaatcagaaatgcacaaggtaattttccagctcctttgcttagaatcgtaattaagaatgttagtatctctcttgcatattaggtcaggttgcatgttatcaccacaaccacccccttacaagtacactacatagtaaagagaattgaataatcaagataggacccaagcagattgtcaaaattttctgaaatgaagtaataattagaattttcaacaaacagatgaatcatcattttcagggaatgtcaaaaattttaatacctactgtaaagcgaacatttgacatgaacacaacaaatacttaaagaaactgtgtgaaaacacattataatcagtttggtcatacttacatggagtgcttctccttaatgctttggggatgataatgccattttttagtcattaatacaaagttaagtcatatgacagctgtttgatgatcaatgcactagactaaaattttgtgctatctgccaattgatagtcagcaaagttaaccgcaatacattttatattgtacattgcctgtgttgcatgcaatagagttagcaaaatgaaagagtagggatcattagtatttttctctcttctgtactgtgaacacaattttgtcccctggttaagtaggtaacaaaaattcagggttctgtgttgtgccttgagctgttttttctaaaactaatttgaaaatcaaacaaattacttttttttttgctgccatcctatatcttatattttagtaaataaaatgaattttaaaacttaaaactctgctaaaagaaatatacaattaaccaatgaacttgtagctcagtcttagtctttaagatttgaatgtgatgttaaagtcagaggtttggtcctccactaattgatctttcccttctctctcccatgagcttgaatcgaatatttaacctaaaaaagaggaaagagagacaatagctaattaaagtttactttggttttgattagcacacattagttgatgacttgattatatacattaacttataatttttttatattggtaacataaaggaaatggatgatgcaaacacccttgttgacaagtctgaaataggaagaacgatatgcacttcagctgagaacaaagtttatctagcatcacacacaaggtaaaatcgaattccttttctatcgtctgaatttgtagttcccttgaacacaacgcattagacttcttatcatccattaacattgaaataaaaaattggtgcttcaggctctgatatagtacaccactcatgactcatctcatccaggatgttatttattttaaattttgtctcctctttacattgacagtgaagtgaaaacttgcttggagaatgaggttatcatcttcagtaatgatcatgctggtgagtgtcatacaaataaattgttgaatgaagtggaagtactaaaggaaaggaataaatatatgggaactcagctgaaagaaatggaagacagatattcagagattagtcttaagtttgcagaggtagagggagaaaggcaacaacttgttatggctctacgtaatctcaggaatggtaagaactagaattctttacaggcgttattgctcacgtacaaaatacacatgggttatgaaacagacaggatatcatggtcatttggtcgaatacagatcaagcttagccatttcacttcagtcgaatctacattttcacctcctccaatttaaatttgctgggctgcttagttcattatttcgggtcgaatgatgcattgaattgacaaggtagctatgggttgtggcctcagataggctatgtagaaaatggattataatttatcatctatttgaacaattttggggtacatatattgcaaactttatagccgattaataaggccaatgatgctcagatttttttttaatcagaaaaagacaattcttttttggtattcaacggggctaaaaagcccggaaaaagaaagctacacagaaattaaaggaggagtcacagctcccatcgaataaaaaaaaacaattggcttaaaaaagcacgcaattgttcaaacatcaaaaaatctccctcaggtctacaccccaaattagcaaaagacaatttgaatatatataaaccgagtagcaccagcaatgccactaaaaactatatgatttaaggcatagttgcccgataatgtcagctaacagaggttaggagtattttaactcattatatgagataaaataattactaaccaaagagaataatactccagctagctaaaaataaccaaaaccatcccttatacattttattgaaaatgtgaaagatcaaagaacaaggctactgaattttgaaaacctatcatctagctgtggtacttgtgcttttcaaaagctgttggctaatttagaagcaccgattttaattttctaaataattaaaaagggctacttgtttttgttttgtttacaaaaagctaaatttaaaagcagtttgactgttgattaaatatatatatatatatatatatatatatatatatatatatatatatatatatatatatatatatatatatatatatatatatatatatacacacacacatattgttggaaaaaaaatcacctgtatgtaatattaacatttctttttaatcattttggttatagcaaaacatttctgaatttcttataattttggtaaaataataaaaatagaagcactaacaattttttggttaaattttgtaccaaatatgcaaaccttctttttttatatatggatatgagtagcctactagcctatgatactttttgaataaagaagcagacttttttgataggaagaatcaaatccacaaccttttcttctttcttaaccaccaaccaactttatatctcttactttccaccattaacagggtgaaaaaaaacaaactaaaattgctatcctaagcaggatcgtagatcttaaatgaatcatcatgtgaaatccccattggcttcaaagatagattatccagtacgctatctaacttcctgttctgatctcgaactccattttcatcaccagtctgagaattaccctcttattatggttttaaaccaaaataccttttaaaaggttaaagccactgacgtatataatataaattctccattcttttcttcaatgatggattattgtgcctgttatagtccgcataaactagctggtaattaggccaaaaaactccttaatacaatgatgattaataagtaataactatcattgcagacttggattccctatcataagaataagaaacattcaatgacgtaggacaatatgagtcattagatgaatgagtataaatctatctaacggtttatattttgtcacgtgttcaccgcacggtgaatatgaacgaaaacttcccacctacatattgcaccttttatgcattcattaacacattgggagcaagataaaactaaaaaggaagaataattctaccccctttttctatctatgccacttatggctatattgcttattgccgttaatgcattgaaaaaggttatataatttggttaaaatcatttgactattgcactacttatatattttcactttaacactagcatataatcaaaacgtaccttcatcgatctcttatcattaggagttcatgttgaagtggaatatcttgctttcttgattgagtttgaagatggacctgattgcttctgtcttttctgttccggaacatttctagatgctctattaggttggtacttaaacaaatcaattacggaaggatttattctcttagaagtcttggacatgctccctgggtacccaaaataagggccagagttctcacttgataatgatttttgacgcaatccgctcttttcttttactttattaataaactcagttgtccaaggtgaattctttaatataatagctgactggcgggcaaatgagaatggagttatgcccaaatgtgagatttcctccttgaatggtgattctaagtttctcatcgatgcctgagttacaacaatgtttttgcggggcttgaaatcaggaggaaaaacatcttctcgaaaatctggttcagggtagttgtcaacttgtcctcgtgtatctttaaaggatctccatattttcgatgagctggatgctgggtgactactattatcaaatgacaatttccttgcaattttattctttctcatctgatctgtctctgccatcaaacttgtgaagtacatggaatcaggagtggcaaagcttttatcaaataaggggttatctgtcaagtccaccacctcacctctaatgtctccatgcagcttctcagaattactaaagttatgccaattcacacctttgcccatcaaagcagtgcccagtatttcattttgagccaactctttatttttcaaggataaactgggttgtttcagtttctctgatttgtggggagctttgcagttccctggtgaataagagactccagaaaggtttctcattgtaactgcaccggtgctttgcttttgactgaaaaactcactcatggaaaaacttgcgtttgcgaagtcactagatctccctgcattttttgacataccaaaatcaaaaggttttggcaaggtagaggaatccgggacagcctcaactacttgatttaatgtctcaaattgcaacaattcatccaaagatggttcatctatctgatcactacttataggattttttctttttctttcattttcaacttcatataaacaacatctatctgagtccagaccagaagatactgaagaggagcaatctgtcattatggattttgaatcctccggttccccatatctgcagaaaacactgaatagagaaatactttcttctggaacatgatacttttctaaaacatgcatcctttgctcatgtgaccatgcaagaaactcattaagcatgacccctgaagatagtatatagtgtgcagttaaaggatttattccaggaaattctgtaagaaatgactcggcaaaagttactgagtcaggcattttaggatacagaccccttgtcatattggtagcactcttaatgcagcttacaataacttcatttgtcaactcaggtgagtaagagaagaatatctgcaaatcaattcccaggcttgttgctgcagcatagagcctatctgaggattccattacagttgaaagaaagttaagctctccttcaaacacctggaaagagaatataacatatttaaaccagctcaatgtataggtacctaacaaccaccatcacaacaactctcatatcttaatcatatttacatttattatgatgcttctattccatcatatctcaatataataagattcagaaaactaattatatcagctaccttgtactaagagtttatatcttccaagcatctaatacaaaatgatgatggctatgattaaaatcccttaatcccctaatccccctttctgcaggggtttatataagtttttactctgtgatacattagtcttccaaagggtctaaaggaaatttcaaaaatagaaaagctgaagccaagttctgagattgagattctttccctccaaaaggcttctcaaatctcaaataactcctaacaaaaccaactggtcaatgtcaagtaccttcaatttttctagagcactacttgacattgcagtattttatagaaacagttaaataaataaataattaaatatcacacaaatgtaattaatataaaaattgaaattaccagaaagcaaccacggaagtaaaaactaagcaatgtcagaacatctgtggcaatattctcaatacataaaggcaagcttgaggatgcttcagtcgcaggagttgctttcttcccaaggtttctactatcatactgtgccaagcaaatagcagaacttaatataatatccacaggcaaatctaaatcacgttcaacaacttgaattccttctttctccattgcaagaattaattggtaagagcttcttctagacattatcatttccttatctacattttgagtatttacgatcataactgttccaggaaaaacctccatgcttttatgatcatgctcagttttcacagcaggaattagtggcgcatgattatctgcttcaggtgcaacctttgaagattttttatcatagctttgctccacaggacaaaagttcagtagtctctccaagttctggttcatactttccttatgattgaaaatgagacgagtctcactttcctggaagacaatcattcttagttgcatgagtgagttcataatatgtttacaggttgattggtagacaatatatgagctaggaattaagagtaaaaatcaattgatgcagctaattcagtaattccaattaaaataggcaacagatgaaagcattttatttcaagaccagtacctcagaaattccaacttcgtttactataatcacaaatttgaagttgcagtcatcttcctctgtggactaaacttgtaattttgttaataattaccaggctaagccattaacccaccactccccttcaaataaaaattgtttcacatttccgtatctgttcaaatatagtattcctactaaagccttctttctggtctacttagactggtacacatgcagagatacagaagcaagaacctgttgttacatttcaatttaaaaccaattgacactaagtgaagttgcctaacaaatatataagctgcaccccaagaactgaggcaggcgatatgagacttccaaacacatgtcacaagtatgatactgtccctcaagtcgtgaataagtaatacaccaaattagttgattaaattacgaatatcagtcaattgagttcctgaaattacaaagtctttaaaattaccgactacaatcatttcagaatttagtctctgacgttatataaaatggtcattttagttcttgatattacaaaaataaggactaaaatggctgacatttggtaatttcaggaattaaaatcacacttttgtaattttaaggattaatatgactactttttgtaattttagaattttgggctaattatttctttcatttttttttatccttttgctcttaatgccttctactttgtaaggtaccacaaaaatccactttgtggagaatccagagtagggacactggggagtgtagtgatggccataagaggtcaatgaaagagctacaatttgaaaacacattatagttgtgtttgagcatttccttcaatggagtaatgaattatattagttcctgttgtaatcgaaatctcaaaacatgttgatgtgtttagttcttgtttctctgtaacagcttcatatatttttttcctcataaatgaagtagctctattagagagaaaatacttccctattattggtatagcatatttgaaatctaattttggaaattttatccgcagtttatcttagtatcataaaaccctattcgtgtatgcctgtttacatcccaatacgtgagatattttacattatactataacagttgagcttgtgcagataaaaatatatggagtaaggaacttagacaaataatttctgaatttgtagtataatatagattctttatatattatccataatcatagaggcttaccattaacatttcaatgtttgggggcatttcaacaccttcgcagagtgcttcgagagcagcatgaccatccaattcaaccctcaaaaagtgaagatgaggcaattcaaccaagttttgtgaaagctcagatatcctagatgagtcatatgggcctccatattccaagataatgtcaaatttgttcaaaggaaacaagggaaaaacatgccttcaatcaaacagaacagttaacttagttttgtagcagaaaaagtatgataaaaaaatggcaccaaaaaatttatggtctgatttgatgctcacgatgtatgatttgaacaactaatttgaggaaattgaaaggaattcggtttcattaaaataatgtaagcatggtccttatgtgctcaccattttggattcttgttgcttcatacccaatatacaaaaagaaaatccatgtgtcgagaattggcaatttgaaaacatgctaaacatatcttgtacaaaaaataaagtgcaattctatgtatgcaatataaataaaaatatcctcaaacaaaagcttacttgtgtgaaaccaacaagcagtctgaaatcagaagttctttcgttttagtatctgtgtccttaggcacagtattggcatatggctgatttctataagaatcatttagttcaatgaatgataaccctagggaaaggaggatatttttcaatgaataccagaatacttcttcagccacaattaaagtttttgaactattctgtttggtgtatgactgtaaaatcttcttgacaattgttaatgatgggtgtgccatagtaacattgctgtccaccttccccttttcatctttgatcaaagattggaggaagcctaactttgatttcaaatactccaagttttgacataatttgtctaaatacaagaatgctggatggagaccatagaaacacaagtaccaagcagcctgtttaatagcacataacacagcaaaagccatattgtttccatttacatggtatttaatcagcttgtgcttttgaagacccaacaattttaaataatctgcatccgagttatgcatttttgtcatctctgtatcactgtgcagaatggctagatagcttttttcaaaatatccagcaagggccacaatattatcggacaatctaactctatgcagaacagtatggaacacttgtgactgtgcaccaaccttcaattcattggatgaaacttttggaatgcaaacattagcattagtggactctactgcataattacaattccccttaccagtcgcttctttagggtttaagaaataatcaagattgctgatttctgacagagatttaaataacaatgaagccctctcagccttttgttcaggtaattgttcttgacttccttgtttagaagatacatgttctataactttgcctgaagcaacttctactggatgattgtcaactagaggcatgccatcagaaagcaacttcttgaactcttcattttgtttaatgtcacattcatctatggtgtcatcacagaaaactagatcaaatgccaattttccatcatcaaaagatgttcctccaaaatcttggttgttcagatctatcttggccaatatgttctgataccagttagagattttgcaattgcacctatcttcttcaagtagatcccagcttaagtaaattccatcagaggcagagaggggccgggtcttcaagctggaaaattgttctacaatgatgtcatgtagagttatcatctttttgtgatcagagataacaggtacgggcagtgatttgaatgtgtcatctgttagtgctgtctcattactaacaatcaattcatcaaaactcttgaagttaaactctttcctaagcatccactcttctgaaactaaatcatccgaagcttttaagtcatagaaagcttcaaaggtttgcattaagtcttcatcaaggaacacaaactcctggaaggtaacaaaattcagtatcagatcactattagcatgcgatgtcctttgcaggccaatattcctatcaacatgttcagtttccagcatattcataaaatccctttcaggaaacagatctgataactccaggctcttctttgatacacactcatctgagaaaaactccatcatgttatgcttcatagaacccaaaagttccttgccctctataacagattgatattgttcatcaaaattttgagatctgatattttcaaaatatgagtcaacaatgtctaccaaagacaagcacgtgggagttcccaaactttcctcatccacttccaaaataagaaatttgtttttatcagagtgtggctggtgctgaacagaaatatgaccttctagagaatatgcattttcccccatcaagtactctgaaattacatcttcaaccaacaatactgattccagagcctcataaggatattgccttgatggttcaggcttgagcatttcctgcaaggaaaataaaataacttattctctatgaagtttggaaacaaacacatgaatggaaaataaataataaaaaaacttgaaatgtttccttgtgccctattactgtatgacctatgcaagttcaattccactcttatagttatgcttgaacagttcatactgaatgatgcaaaaagttatcaacattccaaggataatactaaaacaaaatccattcagctcctccatatttcaagttcaataacgaaaaatgcattaagatattttatattttgagaactcataatcaaagcttacaacaagagaataaagcaactgtttcaagttccaacatccaactaccagacacatttacagaaacaatgcatagttcatgtgaaatctataaaacatatctttgttaccagagtattttcaacttctggagttagagacagcatttgcatcctctccgtctcagtgacacatacgttttcctttaaaatacaaataaataaataacgaaggtgaagattgattcgattgaatgaattttcttaaaacacaaaaggttatatcatatataactacaaaattagaaaggagcatctcaccaagaacgtgccaagctctggtatttcgaactgaattgtctcataaacatcatcgttcttatcattgaaagcaataattttactctcctgcgaataatagtgctaagatcttatctaaataattaaataaacaaaaaaatgcagcaaacaaggagcattaaataatttaattgataaatatacattcgaaaatttgatatcagcttcggatacacgatcttcgaagataacctccgcctctatctgcaacgcaaccaaaacatcgaaaaaccgcgagaacactcaagaacatgaagcttcatatgtaagtacgcattgcacatatcatagaatcacaatttcagagtgaaattctaacaatgatgataatcaacacgagcagatcagacaaacgcaaactcaaaattcacgttgtgatttcgagtctggatgcttactgcgggatttgacggagtggcgagatcgtgagagttgatgcggattcggtgagggaggatggcggggaggaaggtggagagcgtggcgtggaccgggaaggggtcgaggtggagggggaggtggatcggaggatcgaagcggaggaggtggtggacggcggagggaggaggcggagggaggcgagggattgggaagtggaggaaggggaaggtttgaggtggagggagagcgaagtagtcgttgttgagaaagtgagttcgcattttctgaagaaggtgctactaacggactaaactgatttgaatttggcgctaaaagtttggtatttatagcgcgagcgagatttggactttggagctgtgcatgaaccgaaccatgatgagagaggttcgctccgatgaccctaattatggatccgattccaattgttcgttttttattattttttattttatacactctttttatgtgtgtgtgattttttttcaagatttctcttgttgtttctaggatttattttttttaaatgaaggacttttgttaattgtcttctcatgaaggtgtttacttcttttttggttggccaaaggagcactaaaattggttaatgtgtattaattcaaattattatgggaaccaaattaaatataaaatcaatgctgaatagttttttatttgattttctttctttctaaatactatctgttaggaaaggaaaaaaagaagaaagtcatgaagcttcaaatgaaatgagtaagagcacagaaaatcgtaggttgaattggaattttggtttcctttaattttttacctgcgattttgtttactcctgtaatgctagttctcaaattttaaaaaacttgtaattttttttattaatctacaatttcgtatacatttttatttttatattttaattaatgatttaaatatattttaacttgatgataaattaacaaattttattgtgggtccctaaatttttttatttgcattgattagttccttaataaagcaaaaattttatttttgatatttaatttgagtcatccctaatattattctagtaggtctttgtaaaatatttgatatatgaatttttttattaatttatttgaaatatatacaattgaatatatcatttatatttattttaaaataatttttatgaataattttgttaaagaataataaaataaagtatacatttctataatatatatatatatatatatatatatatatatatatatatatatatatatatatatataagttaattaaaatgtaatacatttatatctgttattattagacaggagactgtgagtgtgcatttaaatacacaagaagagaatagtgtaacacttgcatctttgagaggataataatgaaatgaatgttttaaaaatattgttttaatggagaattaacggaatataatttacgtatctaaatttcaaacacttgtatttgatgtttcacatgcttcatgccaaaggttggccaatatcattcgtgtcatctcaatgaatcgaggaaattaacaaaaggaaataacttgaactttctttggcttctaaacccccaaagaatagtccatatttccatgctgggcgaaaaagacatttatcttattatccatttatcttttattaattattgcatatccaagacgtacgtaagaacggtttgttcctacttcaaaagctctcgtggtgtatgagaatgagccacgtgtctaaagctagtcaacacgtgtcaagtgacaaagatgtgttggttatatatgtcacacgtgtctccagttttgagatgccagagccatgcaaaggtggcaaaacagtgtcatgcatgtccttctttataacccttttgttaggaaacattcctcacaccgagtacagtgtacaaacaatttcctattcattcaatcatggattcaagagcagttcaaactcattcgcatgaacatcaccataattctcacaatgttgggtcacacgcaggtacgaatctccatttaatttgaatttgtaagtttgatttggttttacaagaacttttgtttgcttcctctagatacaaaatatttgttgatattttgcttcaaaattttggatgtagtggcacatggtgaagaacaacaccaccatgaccatgagaagaagtcggttctgaagaaagtcaagcaaaaggctaagaaaattaaggacacaatcacaaagcatggccatcatgaccatgaacatgaacatggtcatgagtatcaccttgatgatcaacatatccctgatgatcatgacttggaagaggaagatgagatggatgaatacccagaagtccatggagcaccgagtaagttcttttcttgcacattagaattaatagtagttatatgttcaactctttctgtgtccttttctaagtgttggaaactctcacataggtagtttaattagttgccaatatgaattaagactgcttatatattagttagacagtttcacttaatgtcaattagttgttctagaaggaaattggagcctttaaactgaaaagaatcaagaaaaaaatttgatttcttgggttagttataataatatacatgattgttgtgcagtttatgacagtgccgctgttagaggtgcagcaccagggcatgccaatactttagggaggcctggagttaattttggaggcacaacagttatgggagtagaacctcttcacgagctaagagttgtagttgtttctccaactactgaaattaatcaaaacagaaccactgacccaactagaacatttgttgagggagagaaagcagtgcatcgtaaggtcaatttggagagaccaatgtacttggaggaagatccacatgcgccaagaagtacatctcaagcatatgctccagccaattatcaaaccaaagtcactgatcctaccggggcaggtaagttgaactgagctgcatttataattcaatttcaatgacctgtaggttatggatttgttaatgtatcaatacacaatcagggggttatatatggtgaaatggatacacaataaaatttattgttgtttagaatagttggacagttgattttgtgaggtccttaagtgtttgatacataagtgtgatccacaagatcagtaacagtccaaaatagaaaattcactatcagttctatcatcttaatttaagatgaactatatttgtgtaccatgagatttaacattttcactatgatttctatttttacttgggttgggagtaattcataggaagtagtggttcttcttaacaagtggaaacaatgccttgggctgattcttatctattctcaagccttttctgtgtcatgtcttatggctaacaggtggggcagaaattgacattacccctgttgagaaatctttctctaggatggctgttcacaatgagccaaaaccatacccagaaccaaaactcttttcaactgttcctgaaactcactacccttctgctggaagccactcccaacttgcaccagagctatcttctgcaactaactacccaactaactacccatctgctcaaagctatggtcagtacatgccagaactatctagtgaagttaaaactcagtaccccaaaagccataatcagtttatgccagagttatctacaccaaccaaaactccctacccttccaccaatatccatgaccaacacttaccacaacaatctagtgcaacaaaaactcaataccctttatctggaagtcatgacaagtttgcaccagtgttatctactgaacctaacattcagtacccttcaaccaaaatccatgaccaagacttgcctcagcagtttactgcaacaaaaactcaatacccttcatctggaagccatgatcagttaacaccagaattatctttctctactgaacctaaccttcagtacacttcaacaaaaatccatgaccaacacttgccacaacaatttagtacaaatgcaacacatactatatgtccttcagctggaagtcatgatcaatttctaccagaatatccaactcaaaccaaaaccccacaaacctataccaccacccaagttgaggaaccacactatgaaccatcaaacgagagcagttacacagataaaatctcctccgcaaccacagcaatagctgacaaagccatcactgccaaaaatgttgtagcttcaaagctcggatacggtgatgacaccaccgaaaaaactcaaacaaatcataaagaagagaacacaagcaatgaaaaaccgtcaacaatcacatcagcaacctcagccaaaaacactgtctcttcggatcaccaagagaacacaggcagtgcaaagccatcaacaatctcttcagcaacctctgcaatagctgataaagccatatcagccaaaaacacagtctcttccaagctcggatacgctgacaacaacaccgaaacaactcaagcaagccatcaagagaacacacaaccatcaacaatctctttagcaacagctgcaatagccgataaagccgtctcagcaaaaaacaccgtagcttccaagctcggatatggcgacaacactgaaacaaaaacaactcaaaccactcaaacaaggaatcaattaaagaacacaggcaatgagaaaccttcaacaatctcatcagcaacctctgcaatagctgataaagctgtctcagccaaaaacaccgtagcttcgaagcttggttttggcgacacagcaacaacaacacaacaagagaagagaactgaccatgctgctgctcctacagaatatggaaaaagtgttgctcagtccctgacagagaaactagctccagtttctggaaaagatgctggtgtaggaagtggtgtgaagtccaaagtttctggaactcaaactagtagtatgggtgtggaacaggacaagggggtttctgtgaaggactatttggtggacaaactgaggcgtggtgatgaagacagggctctctctgaagtgatatcagagactctgcacaagaaggaactgccctcagtggaagttactgaagaaggtgtgagaaaggtggtttctgatgctgtgcataagagagaggatgatcctgagagaagaatggaacatcaaagaatactgggaaaggtaactgagtcagaggaagtgaagagaaggttaggaggtgaaagtgtggtgacagagaaaaagtaccaagagatgtatgtgaatagtccaggtaaaggtgtggttgataaggttaaaggtgtggttgggacatggtttaccaacccagcagagaatcaatcttcacaaggtaaataacaatgaatagtagctctagttgtctccatgaggtttctcttgtttgatcaatgccttttgcaaattttacttttttctaaattagttgattgtattcttttaccatacttctctgactaattcttttgttactcttcacattctgcttgagttttgcagctagacaaacatattttgtatcgatattaaaatttattttctctctatttgtttattatatttgtcttgtgacattttttctagtttcttatcttggaaaaagtgttttgagaaacaaacgaaattatgattatgtatgtttctgttagtcttaagacttgattccaagatgaatcgcagttatttgtttacttgttttggtcatgcttgcatatttttctatacgtttctttctttcttttttttttttttcattttgtaagaactgtttaaaaaaaagtggagtattttttatcctagtggttttagacttcagtccaaggtgagttacaattttatttttttttttactttattttgggtatgctattttttactgaagcaaagtgccacataaattttgaatttgtggtttgcatgggtcgaagattcatctatgaattatgaggcaggaagggcagaagtggaacaagctaaccaaggtgcagcaggtgaaagaaggctgcaggagtcatctaattgaagaggtgctttgaaggagtctttgctttgggtgattgtgtagattttcttaaaagctgtttctatatctgtgtgtcttcttctttgttggaagaaagttaggatgctcaagtcacagtaaaataaaaaatttgtgttttttttaatgtttatgtaaatatccaattttttccgggtttatttttatcttttaaataaaaatatttaaaatattttagagaaaaagaaaaaagaaaaattatagaagatgtgacagttacaaaattgatcatcagaaaactggagtaatggtgattcaattgagcaaaaaataaaatattagtaaaagataacgtcattgaagttggtagtctaaaaacaaggagatggtggtataaaggaatcctaaattgttcttggaatataaaagaagagacgcactagcatacaaggagggggacggagaaaaaaaggagaattctgtgaagggaaacccatagaaagattgttttttcgcaattctttcaaaagatgattatgatgctataagatcaggtttgttcttcttttttttttttttttcttttccctcgttcatttgttgttaatgtttggctttcctcagatgctgtttcattttctatttgtctccatcacccatcatcttctccagatgctgtttcattttctatttgtcttcatcacccatcatcttcctcagatggtgtttcattttcccccagtaggtggactaaatgaaaacaagctagatgaaagaatagacatgaaccaataaaatcttaacaacaaaaaatcaaatcacaaaatcgagaaaagaaaaactgtttgatgggcttcactaggtttcacgagtggattcgcagttggattgatcacagttgggttttatgatggggttgcagttgagatcaaagttgggttcctgccaataattctacactatgaataaagataaagaaatttctacactatgaatatttggaattaattaagattagctaattcgatctaaataacaatatgcatatagataaagaaattaaaggaagaaataaaaataagaaaattaaggaaggaaataaatgaaaaaaataagggaaaactttttgtttgggaattttaacaaacacggattaaatcaatgaaaaaattgttcaggtttaattttattggagttcctatcacctaatcactcacatttatatttaataaatgttatattatcattaatttatcatatttttttaacattaatttcttaagtgaagagatccaaatctattgattaaactattaatcccttgaattagcataatcaaacgatttccattaaaataaagtatttattgatgttcagacataaaaattattgagtattttccattaaaataaagtatttattgatgttcagacataaaaattattgagtattctctcgaatttgtagctcaaagaaatttttctattacaattgaataaaaaatcatacaaataggtaaccaagttaaaaatacatattagacgtagaagaaaaacaattacaatattttattgaataaaaaagtaatcattacatagaagaaccaattacattaaactctaagagaagattggttcatggcaataaaaaaatataagagatatacatcacatcctaaaatgacaccaaaatctaagaatacatgataattatcactcatccaaaaaaaataacattaaaattttatagggacgaaaatgatatattttagtctattttttttcttgcttgatataactgtcaacgtttgttgtcagtcataaaaaactttgacatggatttgatggagttgcctatggttcaagttaaaaaagtggggaccttaatatggatttggtggagttgtctaaggtttgtctaaaagacaatatttttttcttttattttattttgaataataaaattttgataatttaaattaattatagtttcaaatatgtagtaacagacttgaatttaataatgtaagactttttgttgtttacttatcacacatgtaataaaaggattgatttaaataatatttataatttgaagactcattattaaaccaaattttattacctttattgtaaactactaatgttttttttttataaaaatattaacatttacttaaaataaaatttttattaatttaagcaattctacacgtttgttaactcgttgtcaagtataacaaatttgtcacacgtagtaaagtactcaagagtctgagtgtggaatccacaaccaatgcatgcataccttatttaaatcttagttaggagttaccctctcccgagcgtcttacccccacaatcaatgcatgtatacataccttatttaaatcttagttaggaattaccctctcccgagcatctaactcctaacagaatattgttttgcttgtaatcatatcttcccgagacttcctcatattttggatattttcttgatcttcgtcttctttcatctcttttttcatatctgcaagccataaataagaaaaatatctaatattaatatttaagccaaagataactgctaaataaatatttttaaagatatttttaatatatttttattatcaaaataattcatatttaatagttatcaacgttaaactaagaaaataaaatgtttcttattttagtatttgacacaagaataaattatatttctttgtagattatttaagttatcatatgaattatttttttaaaatattatattgaaggtgagtatttttatgattgcttaaatttggcacttaaaattatttaaaaagtaaaatggagattaaaattatgttgctcctattatttaagctgataacttgtgaggaaaataaaaaatatgatacaaatttttgtgataaaataattaatattcattttcaaattaattagaaatagacaattaacacaaacaacctttccaaataatgataatgaaaactgaaaaacgtatgcatgaagaatgcaaatcttcataagttggatatttcaataaattgtaaatttatttttctcttctatcactattcttaaaatatcaccacacaagtaaaagaaattcaggcaaagactttaatatatgaagacctgtggtctaacaatagaatagctaggaccatcgataaataatttaaaaaaacatgccacacttcttggtagatcatatactctaatttacattttaagttaaatatgatctacaatacatggaaaaatttggaccaagacttataaaaggaaaaactatgatctcaataattatgatagaccaagttaaacaagcattttagacttctttgtatctcactaattaatttttaatgaaaaagtaaataatattcaagttaaaataaaattagaaatagtcgacacaacaatctttccaattaatgatagtgaaaattagtcttttttcatgtataagaagaatattattttgtaaattaaaaaatggatcaaaattaaatagctagattggaacgaaatagtcttttttatatagatttttttaaccgaaatagtctttaaatttagatcattttcctataattgatgtattcatcatttataattttttcattgcttaattctaaaaatttgttgtcaatgatagggaaattgatatgaaggtaatatagtgtcctatatggaggaccttgacatggacttcatggagtagtctatggttcaagttggaaaagtggggaccttgatatggatttggtggagtggccaactgtttgtcaggagaaaattttgtttttcatttcttttattttgaataataaaattttgatagtttaaaattaattatgggttaaaattgctagtaatagaatatttgaattttataatgcaaaactttttgttatttacttaacacaagtgtaacgaaagaactaatttaaataatagttaaaatttgaagaagaattaaactaaatttaattaccttttatgtaactaaactactcaaaatattaaaaaattattaataatttcttaaatcaaaattttcattgatttaagaaattctatacggtaaactaaaataaaaaaatgtttcttattttagtatttggcacaagaataaattatatttctttgtagattgtttaagttatcgtatgaatttgttttttagaatattatattaaaggtgagtatttttatgattgtttaaatttggcacttgcaattatttaaaaattaaaattatgtttctcctcttatttaagttgataacctataaaaaatataaaatatgatactgatttttttgagaaaaaaagttaatatatattctttttcacacttctttttatacaactaattaatttttatacgataaagaaaataatgttcaagtttaaatacaattagaaatatataatacaacaacctttccaattgatgacaattaaatctaatctttttttcatatataagagaatattattttgtgaattgaaaaattgatcaaaattaaatagttagcttggaatgaaataatctttttttatagatttttttttatccgaaatagtctttaaagtacaccctcttcctataattgatttattcatcaattatatttttttttcttgcttgacttaactagctcgcaacatttgttatgaatgataggaagcttgataggaaggtaatgcattgccctatgtttaaagttgaagaagaccataacatgactggactttgtggagtgttcaaaggttcaagatgaataaatggaaaaccttgagctggacctaatggtgtgggctatgggttgggatatcctaaaatagtacatttgttgtcaatgataggaaacttcatatgagcacaataatgttagaagacaattttcttttacattatttttgtaaaaaaaattgtaccaaaaagaatgtttcttattttagtattgagtacaagaacaaatcatatttctttgttattaattttgattttttttatgaatttagtgtacataggaattttaaaaatggagatagatacagtaaatgtataatttttcgtattctaagaattaattcgggagaattggatacagtaaatgtataatttttcgtattctaagaagtgaagaatattttagtatttggcacaataataaaaaaggtaaaaaaaataatgaaagtgaagaaaaaagcaggcagggcagcagtataaataatagaagtttgatgatttatatgcagaaccaacaactacacttgttttctgtatatccttgtgtgatcatgaattcctcctccatttatattcttgtctttgtccagctttggttgttgagcttaccatgcagagagagtgtgtgcatcccaagtgagcgtgagacacttttgaagtttaagaataatctcatagatccttcaaataggctttggtcttggaatcagaataataccaactgttgccactggtatggagtcctctgccacagcgtcacttcccacgttcttcagcttcacctcaactcttcacattctcctttcaatgacgaccacgattgggaatcttatcggagatggagctttggtggagagataagtccttgtttggctgatttaaaacatttgaattacttggacttgagcggcaatatattttttggagctggtatgtcaattccttctttccttgggacaatgacttccttgactcacctcgacctctctcttactggattcatggggaagattcctcctcagatcgggaatctctctaagcttcgatatcttgacttgagcttcaatgatttacttggagaaggtatggcaatttcttctttcctttgtgcaatgagctccttgactcacctagacctctctgatactggaatccacgggaagattcctcctcagattgggaatctctcaaatttggtgtatcttgacctgagttctgttgttgccaacggaacagtaccctctcagatcgggaatctctctaagcttcgatatcttgacttgagcggcaatgaattccttggagaaggtatgtcaattccttctttcctttgtgcaatgacctccttgactcacctcgacctctctggtaatggattcatggggaagattccatctcagattgggaatctctccaatttggtctatcttggccttggaggtcattctgttgtcgaacctctgtttgctgaaaatgtagaatgggtatcaagtatgtggaagcttgaatatcttcatttgagtaatgcaaacctatccaaagcatttcattggctacacactctccaatctcttccttctttgacccgcctatatttgtcaaactgcacactccctcactataatgaaccatccttgctcaacttctcatctctgcaaactctccatctttccgttactagttattcccctgccatttcttttgtccccaagtggatattcaaattgaagaaacttgtttctcttcaattaccgggtaatgaaatccaaggtccgattcctggtggtattcgaaacctcacacttcttcaaaatcttgacttgtctgaaaattcattctcatcttctatacctgattgcttatacggtcttcatcgtctcaagtctttggacctaagttccagcaacttgcatgggactatttctgatgccctggaaaatttgacttctcttgttgaacttgatttgtcatataatcaacttgaaggaaccattccaacttctttgggaaatttgacttctcttgttgaacttgatttatcacataatcaacttgaaggaacaattccgacttttttgggtaatctccgcaacttaagggagataaatttaaaatatctctatctctcttttaataaattcagtggaaatccatttgaaagtcttggatcactctctaaattgtcatatctttatattgatggcaataattttcaaggagttgtcaaggaagatgatcttgcaaatcttacaagcttggagagattctttgcatcagagaacaatttaactttaaaagttggttccaattggcttcctagttttcagcttaccaatttggatgtgagatcatggcagttaggtcccagctttccatcgtggattcagtcacaaaacaaacttacatatttagacatgtctaacacagggattattgattctattccaacacagatgtgggaagcactttctcaggttttgcattttaacctctctcataatcatatccatggggagcttgtgactacattaaaaaatccaatatctaaccaaattgttgatctaagcacaaatcacttacgtggtaaattgccctatctttcaaatgctgtgtatgggttagacctttcaaccaattcattctctgaatccatgcaagattttttatgtaacaatcaggacaagccaatgcaattacaatttctcaatcttgcatcaaataatctgtcaggagaaatacctgattgttggattaattggccatttctagtggaagtgaatttacaaagcaaccattttgttgggaacttccccccatccatgggttccttggcagacctgcagtctttacaaattcgtaacaacacactctcaggaatatttcctaccagtttgaagaagactggccaattgatatccttggatcttggagaaaataatctttcaggaagtattccaccatgggttggagaaaaactctcaaatatgaaaatcctccgccttatatcaaacagtttttccggtcacattccaaatgaaatatgtcagatgagtcttcttcaggttttagaccttgcaaaaaacaatttgtctggcaatataccgagctgtttcagtaacttgagtgccatgacactagtgaatcgaagtacatatccccgtatctattctcaaccaccgaattatacagaatacatttcgggattaggtatggttagtgtgctactatggctgaaaggaagaggagatgagtaccgaaacattctgggtttggtaacaagcattgatctgtcaagtaacaaattattaggacaaatacctagagaaatcacagatctaaatggattgcactttttgaacttgtcccacaaccaattgattggtcctattccagaaggtattggtaatatgggatcgttacagtccattgatttttcgaggaatcaactttctggtgaaatccctccaaccatttcaaatttgagctttctaagcatgctggacttgtcttataatcatttgaaaggaaaaattccaacaggaactcaattgcaaacctttgaagcctccaactttattggcaacaatctatgtggtccaccactgcccataaattgcagctccaatgggaaaactcatagttatgaaggaagtgatgagcatgaagtgaattggttttatgtcagtgcatcaattggatttgttgtgggattcttgatagtgattgctcctttgctgatttgtagatcatggcggtatgcctattttcatttccttgatcatgtgtggttcaaacttcaatcttttcgctcaggtattatcactgtttagtgttgcttagaatactccgatgttttatcattgtgttggcaggttgatcaatttgtagtcaatgctatcttttttttttttttttcaaatttgagagccttatttaaattctgtttttggatgtaaagagggatagtagctgaacgtaaagaggggaaggataggaggtgtggggaaatggaactaaggataaccaagtaatttcaaatgctttggtagtctcaatagtatttttgatagtgacaatagaagcccatatatatatatatatatatatatatatatataaatgattatatgtgtgatacaacaaaatccaggatagataaaacaacccataccaactatacaaattacaagttaattattatttttacatattttgatgtacaataaatagcaccaacacaacaatgttatatttactaatatattttttaatattaactattttaatacaattaatactgttatttgaacaacatagacattatcttcattttttccttcattttttaattatataattacattgaatatttatatatatacaaaactatcatctatataattctatttctattgaacaaatagattatctttaataaaaacatacttgtgatttaaaaataaaaaactataacacaaaatcaatttttacattgctaattaactaaaaataattctaatttttatcattgaatgcatgaattatattgtaacaaaaacaaattgatctaatattgtatgtaattacttttgttttgtaattatttttatcttttatgaatacgcatctgaaaaacattttcagaactgaacacacaaaataatatatgattataaattgtctaataaattataagttttgtctttcatgtatgcacaggtgtgtttcttcccaaattgtgcaaatgctggtcgacaaatgggtgagatcaaaagctcaggtatggtggctgcagaacctgtgcactctcttcaatttctccacaaccttttgatgatgtagatctctcagatgaacctgccgttgctccattcccgcaatactaagtagtagtatttttcttaatgcttgcaagaaataatttaaatgagtgtattttgatgcttaatgcgtgtttagtttgtaataaggatgttgcgctacacaccaatatggaatgtgtcattaatttatgtattctgttttgtacaaaattttaatgctggaagtggtctctcggactcttcccattgaaaaccagtgtagccagctttcattatttttggttaatatatataaattgttctttagtactgattggtctgaatagagtgatagattataactctttaaatgaatggttaagaatttgaattttatcaactattagttcttcatccttctacgaattttattattagtatctcaattatcttttgggcggtcttaatctatatttctgtttgtcattgcttagtcactttcataaaaaaaaatcactgttaaacgatgtaataatcatatgatttctcacttgggttatgacctaaaaatcatgtgataaaattttaaggtattacaaatattttgtcagcgtaaaactgctaaataattaaaattttgacaaaaaagaagaaaaaggatgtataataaacaaaatcaataattcacaatacacaaattaacctagcttttagcatgttattattatatcaaaaccttttttttggtacctttcaatttgtcattcaagtctagaaggacctatgtgtggacatctaaaggacaccatttatgggtgaaaaatttcaaaatttgtttatcgtacagagcaggattttatataaatatatcagtggagttactattatcactgcgtgccatcaatgttattcacaatacccatgtgggtagaaaattaggaaatttcagaagtattttttttaatggaaaaataattttgttatacaaatatataatagaatcatatttttgtgacattgttggggacataatttttttactacaaaactgtattttcgttattataataaaagggatgtaaagtaaaatgcaaccgagatacaattctattattgttataataaaggagtgtaaaacaaggtaatgagaaaatgattttattttaattattgaatatacacccaatataatcttgatttcgtttcaatttaattattttacaacccctttattccgtgtatattttaataaacaaaaccatgtttccatttagaccattgtcaccctccatccctttccagtctttcttcttgctcccttaacttgcacatcccctccccacttctttctttttcagcaagagtgacacaaatctctgccactcgtggcgcaatgccatctctacactgtgcagcaatctgactcaaaggaaaaagtggagtcgtcatcatctgaatagctcaagcaacttccatggtggtggcatctcactctctttaccttccttaaccagaaatggaaaaatgactaaaaagaaaagaatcatgaccacaacacacaactgcaaaggacaataatagccccatatataagtgattatatgtgtgatacaacaaaatccaggatagataaaacaacaaaccataccaattatacaaattacaattaagttaattattatttttacatattttgatgtacaataaatagcaccaacacaacaatgttatatttactaatatattttttaatattaactattttaatacaattaatactgttatttgaacaacatagacattatcttcattttttttccttcaccgtcttcacccatctttctttgttataaaaaatgtaacaattacagtaaaagttaatttcttatgaaacatgcttcatttagcttattttaaaaattaatgtaataacatttttatcagttgtaaataaagaagagtatttattctaaaaagaattatataaacatacacttagtattggatatgactttacactccatgtaaaacaaattcaataaacgacacctgaatcttttgttcataaatttagggacattacatgaaaggtgcatagatttttctagtagtgtcacagtcctactattgtacgtatcccgcctttttctccttttcagaatgatagataccaccacgctttttgtttctggttctatactcctttcaggacagattcctccatgaacagtgctatttggccaaagagtgttaagtaggtacgtataaaaaacaattcgacacgcaaatttccaaacagagcactaaattaaatggaaaatattacataccaggatataactaaatttgggtttaaacgcgggtgatctaccactgactaataagattttaaaaaacagtttgccattgcaatttctacttgatcatgatttactaaacatattctttgaggagtcttcgtaattgcaacatgacaataattaattatgcctgtatcaattatatctgtccctagtattttccaatacaggaagtcacgagaaaactataacaactactgtggccatagtttaaaagctacattgacgttctaaaagtaggtgaaagcatgcaggtgatgcaacacaaaccttggggtggggtcgatccaattcagatggctatgactaggaggatggtctagctataggcccaaaatgtttgaactttgaatctacaatatttgggcatatatatgtgtactcttccaaaacaaaacaattattttatatttttatcatgtaatattcatctctcttttaaactattaatacatataccttgagtgagtttatcagatgtgcatcaagcattttttttttctgtggccgtgcaagatcttttacagttgctgatgtgtgtaattataactaccgccatgattggtatgagcctctatctaatgttaaagtaaagcttttctgcgtttgatgagtgtttaattgactcaatataattgttgtagatataaacaattgtacttcattataaagagtttttatctgcaagtaacacgtttaatcgtaaagtaaatagtatatacgtactccgaacaatggtggaaataaaattaacaatgatcgacatggtagttatcggactaataatttaatagtatgaataacactacaattgattctgggagaaataaaataaagtgaaaaaacttgtgtaaaagacagatatactttgataaggaaatctaaattgtttaacaaaacatgaaaccatattcgacttagctggaattatggttagagtaacatgcaagtaactttgttactttgattttgatgttactccacaccggaaaaatgatataataacataacaagcataattaattagatttatttattttacacaaagaatcaatttttaattttgttatatgttgtaatatatactttaataatatcaagagtctaatccatttgattcaacagactatacgtgagctgttagaatcaagaatttaaaattaattttattcattgaaaaatcattgaaccctaatcaatgaggtttaatcgttagtggaagcagagaatggagaatggagacacatgagatgatgcaaggaacaaaagtttatgcaagtgctatcaaccgagtgtctttagtgtcgtgaagacccggtttctaactacattatttattaattaattcattttcaaaaagtgcctcataaaaacaccctttttgtggtaatttgatttttaaaataataataatgacatgataactttagaagaaaaagaagtaccaatttttttttttttgttttcatcaactggtttgcgtggagccatttttccactctgtgactgtctgacccgggtgcttttgaaacaggttttgctttgcttctttggcactctgcaaccattgtgtactaccaaagccatttgctgccatttttcacatccataatctttcagtgattttcttgtctcaaaacaaaatcctttgaacaatactaagactctaagcagaaacacacacacacaattttattttttttggaagctcaatgttactactatctatctacccttctcacaatcacaaagtcaatgctcccacttaactgttttcctactccaaaagtgttaaatcctctcatgttattgtacccctagtagttatttgtttctgaccgagtctctttagtgtccaatttgctgatgtgaagggtagaaggacccaatgacaatgtcatcaaatttgaaaagaaataactataaaaaaacaaaaaaaaacatagaccaaaacactattaaacactaaatgaaattaaatatgtttttatccttaataaatactcaaattttatgtttattttctaataaattattattttacgtcgagatcctaataaattaatactaaatgaaattaaatattgatattattgttgttcttctacctccaacgttggttggctcgatatatgcgtgtgcttattttaacgttattagatgctacttgtttatttggtacgttattgttgtctgaagcatagacacgttgtggaattccttagaaattgttaggaatggtgtgtgagaattccctcggcctgaggcatacgcatggttgaggacacgacaaaattaacacattgtcatttcgtcgcttagccaactatattcgtgtggccattaaaaacgtttctcacttactcttttacccattaattattcacaagttaaagtcgcacgcagtaagttgctaccgacaaacatattcagagttatgatatttagacattcaggtttattgtaaaaattaaggttatagtatatcaaaatcttgcccataacatagtatttctatctttttacggatattttgacaatatgacttttttttcaggagtgtgtgatttagactcattcaatttagaaacactacatgattatacagagacttgcttataatattaagataattgtatattaattaaatgaatttgataatataaagatgatcgtgaaaagtttacgaaatatagtgtgcgtgagcaagaggaatatgttagctatttaggtgtaactcattggaaagtaagacatagtcatgtagatgtggtaggtttaacccttgctgccaaagtaaaaaattaagtgggaaacaaaaaaagaagaagaagaaagatagaaaccctcagggtagcttatagttaggagggctcaatatgtctcccttgaccaaacaatttgactaaaacttgaagacaattgaataaggattcaagttttttttattgtcggacgactcaggaaagattcaacattacattttaaattttttatatagttggaaattagtattaaattataagactttttatttgaagtaatatttttataaaatcataatatttttgtgtataaaatttactttaaaatacatttagtaaaacattttagttttagctttataattttaaaaacctaattaagacttaatatatgagaaaaatttgctaaataaaatatgagatcagctgaattttttttattttaataaattttaaaataaaaaataatatattagaaaagtgtgttaacatttctcttgaaatgattagtgtttttgctagcctatgttcctaaccgcaacaggcgccagaaattgtgggttaaccaggcatagagaaattccaaaggttgtgagttgtaagaagtctttgtaaatcacatgtccttcaaactttacacacatcccaaagaagggaccaacgaattcttgactttatgggatcgtgagnnnnnnnnnnnnnnnnnnnnnnnnnnnnnnnnnnnnnnnnnnnnnnnnnnnnnnnnnnnnnnnnnnnnnnnnnnnnnnnnnnnnnnnnnnnnnnnnnnnnnnnnnnnnnnnnnnnnnnnnnnnnnnnnnnnnnnnnnnnnnnnnnnnnnnnnnnnnnnnnnnnnnnnnnnnnnnnnnnnnnnnnnnnnnnnnnnnnnnnnnnnnnnnnnnnnnnnnnnnnnnnnnnnnnnnnnnnnnnnnnnnnnnnnnnnnnnnnnnnnnnnnnnnnnnnnnnnnnnnnnnnnnnnnnnnnnnnnnnnnnnnnnnnnnnnnnnnnnnnnnnnnnnnnnnnnnnnnnnnnnnnnnnnnnnnnnnnnnnnnnnnnnnnnnnnnnnnnnnnnnnnnnnnnnnnnnnnnnnnnnnnnnnnnnnnnnnnnnnnnnnnnnnnnnnnnnnnnnnnnnnnnnnnnnnnnnnnnnnnnnnnnnnnnnnnnnnnnnnnnnnnnnnnnnnnnnnnnnnnnnnnnnnnnnnnnnnnnnnnnnnnnnnnnnnnnnnnnnnnnnnnnnnnnnnnnnnnnnnnnnnnnnnnnnnnnnnnnnnnnnnnnnnnnnnnnnnnnnnnnnnnnnnnnnnnnnnnnnnnnnnnnnnnnnnnnnnnnnnnnnnnnnnnnnnnnnnnnnnnnnnnnnnnnnnnnnnnnnnnnnnnnnnnnnnnnnnnnnnnnnnnnnnnnnnnnnnnnnnnnnnnnnnnnnnnnnnnnnnnnnnnnnnnnnnnnnnnnnnnnnnnnnnnnnnnnnnnnnnnnnnnnnnnnnnnnnnnnnnnnnnnnnnnnnnnnnnnnnnnnnnnnnnnnnnnnnnnnnnnnnnnnnnnnnnnnnnnnnnnnnnnnnnnnnnnnnnnnnnnnnnnnnnnnnnnnnnnnnnnnnnnnnnnnnnnnnnnnnnnnnnnnnnnnnnnnnnnnnnnnnnnnnnnnnnnnnnnnnnnnnnnnnnnnnnnnnnnnnnnnnnnnnnnnnnnnnnnnnnnnnnnnnnnnnnnnnnnnnnnnnnnnnnnnnnnnnnnnnnnnnnnnnnnnnnnnnnnnnnnnnnnnnnnnnnnnnnnnnnnnnnnnnnnnnnnnnnnnnnnnnnnnnnnnnnnnnnnnnnnnnnnnnnnnnnnnnnnnnnnnnnnnnnnnnnnnnnnnnnnnnnnnnnnnnnnnnnnnnnnnnnnnnnnnnnnnnnnnnnnnnnnnnnnnnnnnnnnnnnnnnnnnnnnnnnnnnnnnnnnnnnnnnnnnnnnnnnnnnnnnnnnnnnnnnnnnnnnnnnnnnnnnnnnnnnnnnnnnnnnnnnnnnnnnnnnnnnnnnnnnnnnnnnnnnnnnnnnnnnnnnnnnnnnnnnnnnnnnnnnnnnnnnnnnnnnnnnnnnnnnnnnnnnnnnnnnnnnnnnnnnnnnnnnnnnnnnnnnnnnnnnnnnnnnnnnnnnnnnnnnnnnnnnnnnnnnnnnnnnnnnnnnnnnnnnnnnnnnnnnnnnnnnnnnnnnnnnnnnnnnnnnnnnnnnnnnnnnnnnnnnnnnnnnnnnnnnnnnnnnnnnnnnnnnnnnnnnnnnnnnnnnnnnnnnnnnnnnnnnnnnnnnnnnnnnnnnnnnnnnnnnnnnnnnnnnnnnnnnnnnnnnnnnnnnnnnnnnnnnnnnnnnnnnnnnnnnnnnnnnnnnnnnnnnnnnnnnnnnnnnnnnnnnnnnnnnnnnnnnnnnnnnnnnnnnnnnnnnnnnnnnnnnnnnnnnnnnnnnnnnnnnnnnnnnnnnnnnnnnnnnnnnnnnnnnnnnnnnnnnnnnnnnnnnnnnnnnnnnnnnnnnnnnnnnnnnnnnnnnnnnnnnnnnnnnnnnnnnnnnnnnnnnnnnnnnnnnnnnnnnnnnnnnnnnnnnnnnnnnnnnnnnnnnnnnnnnnnnnnnnnnnnnnnnnnnnnnnnnnnnnnnnnnnnnnnnnnnnnnnnnnnnnnnnnnnnnnnnnnnnnnnnnnnnnnnnnnnnnnnnnnnnnnnnnnnnnnnnnnnnnnnnnnnnnnnnnnnnnnnnnnnnnnnnnnnnnnnnnnnnnnnnnnnnnnnnnnnnnnnnnnnnnnnnnnnnnnnnnnnnnnnnnnnnnnnnnnnnnnnnnnnnnnnnnnnnnnnnnnnnnnnnnnnnnnnnnnnnnnnnnnnnnnnnnnnnnnnnnnnnnnnnnnnnnnnnnnnnnnnnnnnnnnnnnnnnnnnnnnnnnnnnnnnnnnnnnnnnnnnnnnnnnnnnnnnnnnnnnnnnnnnnnnnnnnnnnnnnnnnnnnnnnnnnnnnnnnnnnnnnnnnnnnnnnnnnnnnnnnnnnnnnnnnnnnnnnnnnnnnnnnnnnnnnnnnnnnnnnnnnnnnnnnnnnnnnnnnnnnnnnnnnnnnnnnnnnnnnnnnnnnnnnnnnnnnnnnnnnnnnnnnnnnnnnnnnnnnnnnnnnnnnnnnnnnnnnnnnnnnnnnnnnnnnnnnnnnnnnnnnnnnnnnnnnnnnnnnnnnnnnnnnnnnnnnnnnnnnnnnnnnnnnnnnnnnnnnnnnnnnnnnnnnnnnnnnnnnnnnnnnnnnnnnnnnnnnnnnnnnnnnnnnnnnnnnnnnnnnnnnnnnnnnnnnnnnnnnnnnnnnnnnnnnnnnnnnnnnnnnnnnnnnnnnnnnnnnnnnnnnnnnnnnnnnnnnnnnnnnnnnnnnnnnnnnnnnnnnnnnnnnnnnnnnnnnnnnnnnnnnnnnnnnnnnnnnnnnnnnnnnnnnnnnnnnnnnnnnnnnnnnnnnnnnnnnnnnnnnnnnnnnnnnnnnnnnnnnnnnnnnnnnnnnnnnnnnnnnnnnnnnnnnnnnnnnnnnnnnnnnnnnnnnnnnnnnnnnnnnnnnnnnnnnnnnnnnnnnnnnnnnnnnnnnnnnnnnnnnnnnnnnnnnnnnnnnnnnnnnnnnnnnnnnnnnnnnnnnnnnnnnnnnnnnnnnnnnnnnnnnnnnnnnnnnnnnnnnnnnnnnnnnnnnnnnnnnnnnnnnnnnnnnnnnnnnnnnnnnnnnnnnnnnnnnnnnnnnnnnnnnnnnnnnnnnnnnnnnnnnnnnnnnnnnnnnnnnnnnnnnnnnnnnnnnnnnnnnnnnnnnnnnnnnnnnnnnnnnnnnnnnnnnnnnnnnnnnnnnnnnnnnnnnnnnnnnnnnnnnnnnnnnnnnnnnnnnnnnnnnnnnnnnnnnnnnnnnnnnnnnnnnnnnnnnnnnnnnnnnnnnnnnnnnnnnnnnnnnnnnnnnnnnnnnnnnnnnnnnnnnnnnnnnnnnnnnnnnnnnnnnnnnnnnnnnnnnnnnnnnnnnnnnnnnnnnnnnnnnnnnnnnnnnnnnnnnnnnnnnnnnnnnnnnnnnnnnnnnnnnnnnnnnnnnnnnnnnnnnnnnnnnnnnnnnnnnnnnnnnnnnnnnnnnnnnnnnnnnnnnnnnnnnnnnnnnnnnnnnnnnnnnnnnnnnnnnnnnnnnnnnnnnnnnnnnnnnnnnnnnnnnnnnnnnnnnnnnnnnnnnnnnnnnnnnnnnnnnnnnnnnnnnnnnnnnnnnnnnnnnnnnnnnnnnnnnnnnnnnnnnnnnnnnnnnnnnnnnnnnnnnnnnnnnnnnnnnnnnnnnnnnnnnnnnnnnnnnnnnnnnnnnnnnnnnnnnnnnnnnnnnnnnnnnnnnnnnnnnnnnnnnnnnnnnnnnnnnnnnnnnnnnnnnnnnnnnnnnnnnnnnnnnnnnnnnnnnnnnnnnnnnnnnnnnnnnnnnnnnnnnnnnnnnnnnnnnnnnnnnnnnnnnnnnnnnnnnnnnnnnnnnnnnnnnnnnnnnnnnnnnnnnnnnnnnnnnnnnnnnnnnnnnnnnnnnnnnnnnnnnnnnnnnnnnnnnnnnnnnnnnnnnnnnnnnnnnnnnnnnnnnnnnnnnnnnnnnnnnnnnnnnnnnnnnnnnnnnnnnnnnnnnnnnnnnnnnnnnnnnnnnnnnnnnnnnnnnnnnnnnnnnnnnnnnnnnnnnnnnnnnnnnnnnnnnnnnnnnnnnnnnnnnnnnnnnnnnnnnnnnnnnnnnnnnnnnnnnnnnnnnnnnnnnnnnnnnnnnnnnnnnnnnnnnnnnnnnnnnnnnnnnnnnnnnnnnnnnnnnnnnnnnnnnnnnnnnnnnnnnnnnnnnnnnnnnnnnnnnnnnnnnnnnnnnnnnnnnnnnnnnnnnnnnnnnnnnnnnnnnnnnnnnnnnnnnnnnnnnnnnnnnnnnnnnnnnnnnnnnnnnnnnnnnnnnnnnnnnnnnnnnnnnnnnnnnnnnnnnnnnnnnnnnnnnnnnnnnnnnnnnnnnnnnnnnnnnnnnnnnnnnnnnnnnnnnnnnnnnnnnnnnnnnnnnnnnnnnnnnnnnnnnnnnnnnnnnnnnnnnnnnnnnnnnnnnnnnnnnnnnnnnnnnnnnnnnnnnnnnnnnnnnnnnnnnnnnnnnnnnnnnnnnnnnnnnnnnnnnnnnnnnnnnnnnnnnnnnnnnnnnnnnnnnnnnnnnnnnnnnnnnnnnnnnnnnnnnnnnnnnnnnnnnnnnnnnnnnnnnnnnnnnnnnnnnnnnnnnnnnnnnnnnnnnnnnnnnnnnnnnnnnnnnnnnnnnnnnnnnnnnnnnnnnnnnnnnnnnnnnnnnnnnnnnnnnnnnnnnnnnnnnnnnnnnnnnnnnnnnnnnnnnnnnnnnnnnnnnnnnnnnnnnnnnnnnnnnnnnnnnnnnnnnnnnnnnnnnnnnnnnnnnnnnnnnnnnnnnnnnnnnnnnnnnnnnnnnnnnnnnnnnnnnnnnnnnnnnnnnnnnnnnnnnnnnnnnnnnnnnnnnnnnnnnnnnnnnnnnnnnnnnnnnnnnnnnnnnnnnnnnnnnnnnnnnnnnnnnnnnnnnnnnnnnnnnnnnnnnnnnnnnnnnnnnnnnnnnnnnnnnnnnnnnnnnnnnnnnnnnnnnnnnnnnnnnnnnnnnnnnnnnnnnnnnnnnnnnnnnnnnnnnnnnnnnnnnnnnnnnnnnnnnnnnnnnnnnnnnnnnnnnnnnnnnnnnnnnnnnnnnnnnnnnnnnnnnnnnnnnnnnnnnnnnnnnnnnnnnnnnnnnnnnnnnnnnnnnnnnnnnnnnnnnnnnnnnnnnnnnnnnnnnnnnnnnnnnnnnnnnnnnnnnnnnnnnnnnnnnnnnnnnnnnnnnnnnnnnnnnnnnnnnnnnnnnnnnnnnnnnnnnnnnnnnnnnnnnnnnnnnnnnnnnnnnnnnnnnnnnnnnnnnnnnnnnnnnnnnnnnnnnnnnnnnnnnnnnnnnnnnnnnnnnnnnnnnnnnnnnnnnnnnnnnnnnnnnnnnnnnnnnnnnnnnnnnnnnnnnnnnnnnnnnnnnnnnnnnnnnnnnnnnnnnnnnnnnnnnnnnnnnnnnnnnnnnnnnnnnnnnnnnnnnnnnnnnnnnnnnnnnnnnnnnnnnnnnnnnnnnnnnnnnnnnnnnnnnnnnnnnnnnnnnnnnnnnnnnnnnnnnnnnnnnnnnnnnnnnnnnnnnnnnnnnnnnnnnnnnnnnnnnnnnnnnnnnnnnnnnnnnnnnnnnnnnnnnnnnnnnnnnnnnnnnnnnnnnnnnnnnnnnnnnnnnnnnnnnnnnnnnnnnnnnnnnnnnnnnnnnnnnnnnnnnnnnnnnnnnnnnnnnnnnnnnnnnnnnnnnnnnnnnnnnnnnnnnnnnnnnnnnnnnnnnnnnnnnnnnnnnnnnnnnnnnnnnnnnnnnnnnnnnnnnnnnnnnnnnnnnnnnnnnnnnnnnnnnnnnnnnnnnnnnnnnnnnnnnnnnnnnnnnnnnnnnnnnnnnnnnnnnnnnnnnnnnnnnnnnnnnnnnnnnnnnnnnnnnnnnnnnnnnnnnnnnnnnnnnnnnnnnnnnnnnnnnnnnnnnnnnnnnnnnnnnnnnnnnnnnnnnnnnnnnnnnnnnnnnnnnnnnnnnnnnnnnnnnnnnnnnnnnnnnnnnnnnnnnnnnnnnnnnnnnnnnnnnnnnnnnnnnnnnnnnnnnnnnnnnnnnnnnnnnnnnnnnnnnnnnnnnnnnnnnnnnnnnnnnnnnnnnnnnnnnnnnnnnnnnnnnnnnnnnnnnnnnnnnnnnnnnnnnnnnnnnnnnnnnnnnnnnnnnnnnnnnnnnnnnnnnnnnnnnnnnnnnnnnnnnnnnnnnnnnnnnnnnnnnnnnnnnnnnnnnnnnnnnnnnnnnnnnnnnnnnnnnnnnnnnnnnnnnnnnnnnnnnnnnnnnnnnnnnnnnnnnnnnnnnnnnnnnnnnnnnnnnnnnnnnnnnnnnnnnnnnnnnnnnnnnnnnnnnnnnnnnnnnnnnnnnnnnnnnnnnnnnnnnnnnnnnnnnnnnnnnnnnnnnnnnnnnnnnnnnnnnnnnnnnnnnnnnnnnnnnnnnnnnnnnnnnnnnnnnnnnnnnnnnnnnnnnnnnnnnnnnnnnnnnnnnnnnnnnnnnnnnnnnnnnnnnnnnnnnnnnnnnnnnnnnnnnnnnnnnnnnnnnnnnnnnnnnnnnnnnnnnnnnnnnnnnnnnnnnnnnnnnnnnnnnnnnnnnnnnnnnnnnnnnnnnnnnnnnnnnnnnnnnnnnnnnnnnnnnnnnnnnnnnnnnnnnnnnnnnnnnnnnnnnnnnnnnnnnnnnnnnnnnnnnnnnnnnnnnnnnnnnnnnnnnnnnnnnnnnnnnnnnnnnnnnnnnnnnnnnnnnnnnnnnnnnnnnnnnnnnnnnnnnnnnnnnnnnnnnnnnnnnnnnnnnnnnnnnnnnnnnnnnnnnnnnnnnnnnnnnnnnnnnnnnnnnnnnnnnnnnnnnnnnnnnnnnnnnnnnnnnnnnnnnnnnnnnnnnnnnnnnnnnnnnnnnnnnnnnnnnnnnnnnnnnnnnnnnnnnnnnnnnnnnnnnnnnnnnnnnnnnnnnnnnnnnnnnnnnnnnnnnnnnnnnnnnnnnnnnnnnnnnnnnnnnnnnnnnnnnnnnnnnnnnnnnnnnnnnnnnnnnnnnnnnnnnnnnnnnnnnnnnnnnnnnnnnnnnnnnnnnnnnnnnnnnnnnnnnnnnnnnnnnnnnnnnnnnnnnnnnnnnnnnnnnnnnnnnnnnnnnnnnnnnnnnnnnnnnnnnnnnnnnnnnnnnnnnnnnnnnnnnnnnnnnnnnnnnnnnnnnnnnnnnnnnnnnnnnnnnnnnnnnnnnnnnnnnnnnnnnnnnnnnnnnnnnnnnnnnnnnnnnnnnnnnnnnnnnnnnnnnnnnnnnnnnnnnnnnnnnnnnnnnnnnnnnnnnnnnnnnnnnnnnnnnnnnnnnnnnnnnnnnnnnnnnnnnnnnnnnnnnnnnnnnnnnnnnnnnnnnnnnnnnnnnnnnnnnnnnnnnnnnnnnnnnnnnnnnnnnnnnnnnnnnnnnnnnnnnnnnnnnnnnnnnnnnnnnnnnnnnnnnnnnnnnnnnnnnnnnnnnnnnnnnnnnnnnnnnnnnnnnnnnnnnnnnnnnnnnnnnnnnnnnnnnnnnnnnnnnnnnnnnnnnnnnnnnnnnnnnnnnnnnnnnnnnnnnnnnnnnnnnnnnnnnnnnnnnnnnnnnnnnnnnnnnnnnnnnnnnnnnnnnnnnnnnnnnnnnnnnnnnnnnnnnnnnnnnnnnnnnnnnnnnnnnnnnnnnnnnnnnnnnnnnnnnnnnnnnnnnnnnnnnnnnnnnnnnnnnnnnnnnnnnnnnnnnnnnnnnnnnnnnnnnnnnnnnnnnnnnnnnnnnnnnnnnnnnnnnnnnnnnnnnnnnnnnnnnnnnnnnnnnnnnnnnnnnnnnnnnnnnnnnnnnnnnnnnnnnnnnnnnnnnnnnnnnnnnnnnnnnnnnnnnnnnnnnnnnnnnnnnnnnnnnnnnnnnnnnnnnnnnnnnnnnnnnnnnnnnnnnnnnnnnnnnnnnnnnnnnnnnnnnnnnnnnnnnnnnnnnnnnnnnnnnnnnnnnnnnnnnnnnnnnnnnnnnnnnnnnnnnnnnnnnnnnnnnnnnnnnnnnnnnnnnnnnnnnnnnnnnnnnnnnnnnnnnnnnnnnnnnnnnnnnnnnnnnnnnnnnnnnnnnnnnnnnnnnnnnnnnnnnnnnnnnnnnnnnnnnnnnnnnnnnnnnnnnnnnnnnnnnnnnnnnnnnnnnnnnnnnnnnnnnnnnnnnnnnnnnnnnnnnnnnnnnnnnnnnnnnnnnnnnnnnnnnnnnnnnnnnnnnnnnnnnnnnnnnnnnnnnnnnnnnnnnnnnnnnnnnnnnnnnnnnnnnnnnnnnnnnnnnnnnnnnnnnnnnnnnnnnnnnnnnnnnnnnnnnnnnnnnnnnnnnnnnnnnnnnnnnnnnnnnnnnnnnnnnnnnnnnnnnnnnnnnnnnnnnnnnnnnnnnnnnnnnnnnnnnnnnnnnnnnnnnnnnnnnnnnnnnnnnnnnnnnnnnnnnnnnnnnnnnnnnnnnnnnnnnnnnnnnnnnnnnnnnnnnnnnnnnnnnnnnnnnnnnnnnnnnnnnnnnnnnnnnnnnnnnnnnnnnnnnnnnnnnnnnnnnnnnnnnnnnnnnnnnnnnnnnnnnnnnnnnnnnnnnnnnnnnnnnnnnnnnnnnnnnnnnnnnnnnnnnnnnnnnnnnnnnnnnnnnnnnnnnnnnnnnnnnnnnnnnnnnnnnnnnnnnnnnnnnnnnnnnnnnnnnnnnnnnnnnnnnnnnnnnnnnnnnnnnnnnnnnnnnnnnnnnnnnnnnnnnnnnnnnnnnnnnnnnnnnnnnnnnnnnnnnnnnnnnnnnnnnnnnnnnnnnnnnnnnnnnnnnnnnnnnnnnnnnnnnnnnnnnnnnnnnnnnnnnnnnnnnnnnnnnnnnnnnnnnnnnnnnnnnnnnnnnnnnnnnnnnnnnnnnnnnnnnnnnnnnnnnnnnnnnnnnnnnnnnnnnnnnnnnnnnnnnnnnnnnnnnnnnnnnnnnnnnnnnnnnnnnnnnnnnnnnnnnnnnnnnnnnnnnnnnnnnnnnnnnnnnnnnnnnnnnnnnnnnnnnnnnnnnnnnnnnnnnnnnnnnnnnnnnnnnnnnnnnnnnnnnnnnnnnnnnnnnnnnnnnnnnnnnnnnnnnnnnnnnnnnnnnnnnnnnnnnnnnnnnnnnnnnnnnnnnnnnnnnnnnnnnnnnnnnnnnnnnnnnnnnnnnnnnnnnnnnnnnnnnnnnnnnnnnnnnnnnnnnnnnnnnnnnnnnnnnnnnnnnnnnnnnnnnnnnnnnnnnnnnnnnnnnnnnnnnnnnnnnnnnnnnnnnnnnnnnnnnnnnnnnnnnnnnnnnnnnnnnnnnnnnnnnnnnnnnnnnnnnnnnnnnnnnnnnnnnnnnnnnnnnnnnnnnnnnnnnnnnnnnnnnnnnnnnnnnnnnnnnnnnnnnnnnnnnnnnnnnnnnnnnnnnnnnnnnnnnnnnnnnnnnnnnnnnnnnnnnnnnnnnnnnnnnnnnnnnnnnnnnnnnnnnnnnnnnnnnnnnnnnnnnnnnnnnnnnnnnnnnnnnnnnnnnnnnnnnnnnnnnnnnnnnnnnnnnnnnnnnnnnnnnnnnnnnnnnnnnnnnnnnnnnnnnnnnnnnnnnnnnnnnnnnnnnnnnnnnnnnnnnnnnnnnnnnnnnnnnnnnnnnnnnnnnnnnnnnnnnnnnnnnnnnnnnnnnnnnnnnnnnnnnnnnnnnnnnnnnnnnnnnnnnnnnnnnnnnnnnnnnnnnnnnnnnnnnnnnnnnnnnnnaagtaaatgaaattcaggaaaagattttaatatatgaagacttgtggtctaaaaattaaatagctaggaccatagataaataatttcaaaaacatgccacacttctagtagatcatatcctctaatttacattttaagttaaatgtgatctacaatacgtgaagaaatttggaccaagacttataaaaggaaaaactatgattcaataattatgatagaccaagttaaacaagcattttacatttttttgtatctcactaattaatttttaatgaaaaagaaaatactatgcaggttaaaatacaattagaaatagacaacataacaatttttccaattaatgacaatgaaaattagtcttttttcatatataagaagaatattattttgtgaattaaaaaatggatcaaaataaaatagctagataggaacgaaatagtctttttttatatagattttttaaccgaaataatttttaaattatatccttttttctataattgatgtattcatcattaattttttccttgcttacttaattctaaacatttgtagtcaatgataagaaacttgatatgaaggtaatgtggtgacctatggttcaagttgaagaagtggggggacattgacatgaacttggtggagtggcctatgggctatggatgaagttgaagaagtcagagaccttaatatgggtggactttgtggagtgtcctaaggttaaagatgaaaaaatggaggaccttgacatggacttgatggagtagtctatggttcaagttggaaaagtggggaccttgatatggatttggtggagtggccagcggtttctctaggagaaaattttgttttcatttcttttattttgaataataaaaatttgatagtttaaaattaattatgggttcaaattgcaagtaataaaatatttgaattttataatgcaagactttttgttatatacttaactaaggtgtaacaaaagaactgattttaaataatagttaaaatttgaagacgaattaagctaaatttagttacctctgatgtaaattactcaatgttaaaaaattattaatatttttttaagataaatttttcattgatttaagcaattannnnnnnnnnnnnnnnnnnnnnnnnnnnnnnnnnnnnnnnnnnnnnnnnnnnnnnnnnnnnnnnnnnnnnnnnnnnnnnnnnnnnnnnnnnnnnnnnnnnnnnnnnnnnnnnnnnnnnnnnnnnnnnnnnnnnnnnnnnnnnnnnnnnnnnnnnnnnnnnnnnnnnnnnnnnnnnnnnnnnnnnnnnnnnnnnnnnnnnnnnnnnnnnnnnnnnnnnnnnnnnnnnnnnnnnnnnnnnnnnnnnnnnnnnnnnnnnnnnnnnnnnnnnnnnnnnnnnnnnnnnnnnnnnnnnnnnnnnnnnnnnnnnnnnnnnnnnnnnnnnnnnnnnnnnnnnnnnnnnnnnnnnnnnnnnnnnnnnnnnnnnnnnnnnnnnnnnnnnnnnnnnnnnnnnnnnnnnnnnnnnnnnnnnnnnnnnnnnnnnnnnnnnnnnnnnnnnnnnnnnnnnnnnnnnnnnnnnnnnnnnnnnnnnnnnnnnnnnnnnnnnnnnnnnnnnnnnnnnnnnnnnnnnnnnnnnnnnnnnnnnnnnnnnnnnnnnnnnnnnnnnnnnnnnnnnnnnnnnnnnnnnnnnnnnnnnnnnnnnnnnnnnnnnnnnnnnnnnnnnnnnnnnnnnnnnnnnnnnnnnnnnnnnnnnnnnnnnnnnnnnnnnnnnnnnnnnnnnnnnnnnnnnnnnnnnnnnnnnnnnnnnnnnnnnnnnnnnnnnnnnnnnnnnnnnnnnnnnnnnnnnnnnnnnnnnnnnnnnnnnnnnnnnnnnnnnnnnnnnnnnnnnnnnnnnnnnnnnnnnnnnnnnnnnnnnnnnnnnnnnnnnnnnnnnnnnnnnnnnnnnnnnnnnnnnnnnnnnnnnnnnnnnnnnnnnnnnnnnngcccccgccgttggtagcagtgcttgcttgtgtattttttatatagatttttttaaactgaaatggtctttaaagtacacccttttcctataattgatttattaatcaattatatattttttccttgcttgacttaactcgcaataattattgtcaatgacgaacttgatatgaaggtaatggagtgacctatggttaaagttgaagaagtcagaccataacatggctggacttggtggagtgcccaaaggttcaagatcaacaaatggaaaaccttgagatggacttgatggtgtgagctttggtttagaagacaaattttcttttacattatttttagtttgaatattgaaaatttgataatttaatattaattatggattggaatatcatgaaatagaagacttgattttttctttttttaaaaatattggacttttactgttttcgtaacaaaagtttaacaaaaggattgattaaataatagttaaaattcaaagtttaatgataccaaattttcatttaagcagttctaaagggtaaattaaaataaagtgattcttatttatttttgtaaaaaaaaagctgtaccaaaaagaatgttatttattttagtattgagcacaagaattaatcatatttcattgttattaattttttttatgaatttagtgtacataggaattttaaaaaaagagatagatacagtaaatgcataatttttcgtattctaagaattaattcgggagaattggataattaagtcgataatttaaaaaagccagcgtaaaaaaagaagtgaattaaaatgttaaaaaaatattttagtatttgtcacaataataaaaaaacgtaaaaaataatgaaagtgaaaaaaaaggcttaaaatataattgtcgtctttttttaatatgttattttagttttttatttttaattgaaatattttatctcttatttttaaaaaatcttgtaattttagtctttttattttttaattgagatatttttaaaaaatatgtcattttaatccatttgatcaaattcttgtttttaattaggatattttgtcctttaaaagttattttgaagaaaccaagaaatacaataaattttattgattttaataaaatacttatttcctattctaagaattaagtcggagaattggataataaagtcaataattaaaaaaaggaaacgccaaaaaaaaaaaaaagaaagacacttgcatcagtataaaggaaaccgttctaagaagtgaattaaaatattaaaaaaatattttagtatttggcacaataataaaaaaggtaaaaaataatgaaagtgaagaaaaaaacaggcagggcagcagtataaataatagaagtttgatgatttatatgcagaaccaacaactacacttgttttctatatattcttgtgtgatcatgaattcctccatttatattcttgtctttgtccagctttggttgttcagcttaccatgcagagagagtgtgtgcatcccaagtgagcgtgagacacttttgaagtttaagaataatctcaatgattcttcaaataggctttggtcttggaatcataatcataccaactgttgccactggtatggagtcctctgccacaacgtcacttcccatcttcttcagcttcacctccacacttctgattatgcaaattgggaagcttatcggagatggagctttggtggagagataagtccttgtttggctgatttaaagcatttgaattacttggacttgagcggcaatcttttccttggagaaggtatgtcaattccttctttccttgggacaatgacttccttgactcacctcgacctctctgatactggattccgtgggaagattcctcctcagattgggaatctctccaatttggtctatcttgacctggcgtatgccgccaacggaacagtaccctctcagatcgggaatctctccaatttggtctatcttgtccttggaggtcattctgttgtcgaacctctgtttgctgaaaatgtagaatgggtatcaagtatgtggaagcttgaatatcttgatttgagttatgcaaacctatccaaagcatttcattggctacacactctccaatctcttccttctttgaccctcctatgtttgtcagactgcacactccctcactataatgaaccatccttgctcaacttctcatctctgcaaactctcattctttacaatactagttattcccctgccatttcttttgtccccaagtggatattcaaattgaagaaacttgtttctcttcaattacatggtaatgaaatccaaggtccgattccttgtggtattcgaaacctcacacttattcaaaatcttgacttgtctggaaattcattctcatcttctatacctgattgcttatacggtcttcatcgtctcaagtctttggaaattcattccagcaacttgcatgggactatttctgatgccctgggaaatttgacttctcttgttgaacttcatttgtcaaacaatcaacttgaaggaaccattccaacttctttgggaaatttgacttctctttttgcactttatttgtcatataatcaacttgaaggaacaattccgacttttttgggaaatctccgcaactcaagggagatagatttaacaattctcgatctctctattaataaattcagcggaaatccatttgaaagtcttggatcactctctaaattgtcaacgcttcttattgatggcaataattttcaaggagttgtcaacgaagatgatcttgcaaatcttacaagcttgaaggagtttattgcatcagggaacaatttcactttaaaagtgggtcctaattggattcctaattttcaacttacctatttggatgtgacatcatggcagataggtcccaactttccatcgtggattcaatcacaaaacaagtnnnnnnnnnnnnnnnnnnnnnnnnnnnnnnnnnnnnnnnnnnnnnnnnnnnnnnnnnnnnnnnnnnnnnnnnnnnnnnnnnnnnnnnnnnnnnnnnnnnnnnnnnnnnnnnnnnnnnnnnnnnnnnnnnnnnnnnnnnnnnnnnnnnnnnnnnnnnnnnnnnnnnnnnnnnnnnnnnnnnnnnnnnnnnnnnnnnnnnnnnnnnnnnnnnnnnnnnnnnnnnnnnnnnnnnnnnnnnnnnnnnnnnnnnnnnnnnnnnnnnnnnnnnnnnnnnnnnnnnnnnnnnnnnnnnnnnnnnnnnnnnnnnnnnnnnnnnnnnnnnnnnnnnnnnnnnnnnnnnnnnnnnnnnnnnnnnnnnnnnnnnnnnnnnnnnnnnnnnnnnnnnnnnnnnnnnnnnnnnnnnnnnnnnnnnnnnnnnnnnnnnnnnnnnnnnnnnnnnnnnnnnnnnnnnnnnnnnnnnnnnnnnnnnnnnnnnnnnnnnnnnnnnnnnnnnnnnnnnnnnnnnnnnnnnnnnnnnnnnnnnnnnnnnnnnnnnnnnnnnnnnnnnnnnnnnnnnnnnnnnnnnnnnnnnnnnnnnnnnnnnnnnnnnnnnnnnnnnnnnnnnnnnnnnnnnnnnnnnnnnnnnnnnnnnnnnnnnnnnnnnnnnnnnnnnnnnnnnnnnnnnnnnnnnnnnnnnnnnnnnnnnnnnnnnnnnnnnnnnnnnnnnnnnnnnnnnnnnnnnnnnnnnnnnnnnnnnnnnnnnnnnnnnnnnnnnnnnnnnnnnnnnnnnnnnnnnnnnnnnnnnnnnnnnnnnnnnnnnnnnnnnnnnnnnnnnnnnnnnnnnnnnnnnnnnnnnnnnnnnnnnnnnnnnnnnnnnnnnnnnnnnnnnnnnnnnnnnnnnnnnnnnnnnnnnnnnnnnnnnnnnnnnnnnnnnnnnnnnnnnnnnnnnnnnnnnnnnnnnnnnnnnnnnnnnnnnnnnnnnnnnnnnnnnnnnnnnnnnnnnnnnnnnnnnnnnnnnnnnnnnnnnnnnnnnnnnnnnnnnnnnnnnnnnnnnnnnnnnnnnnnnnnnnnnnnnnnnnnnnnnnnnnnnnnnnnnnnnnnnnnnnnnnnnnnnnnnnnnnnnnnnnnnnnnnnnnnnnnnnnnnnnnnnnnnnnnnnnnnnnnnnnnnnnnnnnnnnnnnnnnnnnnnnnnnnnnnnnnnnnnnnnnnnnnnnnnnnnnnnnnnnnnnnnnnnnnnnnnnnnnnnnnnnnnnnnnnnnnnnnnnnnnnnnnnnnnnnnnnnnnnnnnnnnnnnnnnnnnnnnnnnnnnnnnnnnnnnnnnnnnnnnnnnnnnnnnnnnnnnnnnnnnnnnnnnnnnnnnnnnnnnnnnnnnnnnnnnnnnnnnnnnnnnnnnnnnnnnnnnnnnnnnnnnnnnnnnnnnnnnnnnnnnnnnnnnnnnnnnnnnnnnnnnnnnnnnnnnnnnnnnnnnnnnnnnnnnnnnnnnnnnnnnnnnnnnnnnnnnnnnnnnnnnnnnnnnnnnnnnnnnnnnnnnnnnnnnnnnnnnnnnnnnnnnnnnnnnnnnnnnnnnnnnnnnnnnnnnnnnnnnnnnnnnnnnnnnnnnnnnnnnnnnnnnnnnnnnnnnnnnnnnnnnnnnnnnnnnnnnnnnnnnnnnnnnnnnnnnnnnnnnnnnnnnnnnnnnnnnnnnnnnnnnnnnnnnnnnnnnnnnnnnnnnnnnnnnnnnnnnnnnnnnnnnnnnnnnnnnnnnnnnnnnnnnnnnnnnnnnnnnnnnnnnnnnnnnnnnnnnnnnnnnnnnnnnnnnnnnnnnnnnnnnnnnnnnnnnnnnnnnnnnnnnnnnnnnnnnnnnnnnnnnnnnnnnnnnnnnnnnnnnnnnnnnnnnnnnnnnnnnnnnnnnnnnnnnnnnnnnnnnnnnnnnnnnnnnnnnnnnnnnnnnnnnnnnnnnnnnnnnnnnnnnnnnnnnnnnnnnnnnnnnnnnnnnnnnnnnnnnnnnnnnnnnnnnnnnnnnnnnnnnnnnnnnnnnnnnnnnnnnnnnnnnnnnnnnnnnnnnnnnnnnnnnnnnnnnnnnnnnnnnnnnnnnnnnnnnnnnnnnnnnnnnnnnnnnnnnnnnnnnnnnnnnnnnnnnnnnnnnnnnnnnnnnnnnnnnnnnnnnnnnnnnnnnnnnnnnnnnnnnnnnnnnnnnnnnnnnnnnnnnnnnnnnnnnnnnnnnnnnnnnnnnnnnnnnnnnnnnnnnnnnnnnnnnnnnnnnnnnnnnnnnnnnnnnnnnnnnnnnnnnnnnnnnnnnnnnnnnnnnnnnnnnnnnnnnnnnnnnnnnnnnnnnnnnnnnnnnnnnnnnnnnnnnnnnnnnnnnnnnnnnnnnnnnnnnnnnnnnnnnnnnnnnnnnnnnnnnnnnnnnnnnnnnnnnnnnnnnnnnnnnnnnnnnnnnnnnnnnnnnnnnnnnnnnnnnnnnnnnnnnnnnnnnnnnnnnnnnnnnnnnnnnnnnnnnnnnnnnnnnnnnnnnnnnnnnnnnnnnnnnnnnnnnnnnnnnnnnnnnnnnnnnnnnnnnnnnnnnnnnnnnnnnnnnnnnnnnnnnnnnnnnnnnnnnnnnnnnnnnnnnnnnnnnnnnnnnnnnnnnnnnnnnnnnnnnnnnnnnnnnnnnnnnnnnnnnnnnnnnnnnnnnnnnnnnnnnnnnnnnnnnnnnnnnnnnnnnnnnnnnnnnnnnnnnnnnnnnnnnnnnnnnnnnnnnnnnnnnnnnnnnnnnnnnnnnnnnnnnnnnnnnnnnnnnnnnnnnnnnnnnnnnnnnnnnnnnnnnnnnnnnnnnnnnnnnnnnnnnnnnnnnnnnnnnnnnnnnnnnnnnnnnnnnnnnnnnnnnnnnnnnnnnnnnnnnnnnnnnnnnnnnnnnnnnnnnnnnnnnnnnnnnnnnnnnnnnnnnnnnnnnnnnnnnnnnnnnnnnnnnnnnnnnnnnnnnnnnnnnnnnnnnnnnnnnnnnnnnnnnnnnnnnnnnnnnnnnnnnnnnnnnnnnnnnnnnnnnnnnnnnnnnnnnnnnnnnnnnnnnnnnnnnnnnnnnnnnnnnnnnnnnnnnnnnnnnnnnnnnnnnnnnnnnnnnnnnnnnnnnnnnnnnnnnnnnnnnnnnnnnnnnnnnnnnnnnnnnnnnnnnnnnnnnnnnnnnnnnnnnnnnnnnnnnnnnnnnnnnnnnnnnnnnnnnnnnnnnnnnnnnnnnnnnnnnnnnnnnnnnnnnnnnnnnnnnnnnnnnnnnnnnnnnnnnnnnnnnnnnnnnnnnnnnnnnnnnnnnnnnnnnnnnnnnnnnnnnnnnnnnnnnnnnnnnnnnnnnnnnnnnnnnnnnnnnnnnnnnnnnnnnnnnnnnnnnnnnnnnnnnnnnnnnnnnnnnnnnnnnnnnnnnnnnnnnnnnnnnnnnnnnnnnnnnnnnnnnnnnnnnnnnnnnnnnnnnnnnnnnnnnnnnnnnnnnnnnnnnnnnnnnnnnnnnnnnnnnnnnnnnnnnnnnnnnnnnnnnnnnnnnnnnnnnnnnnnnnnnnnnnnnnnnnnnnnnnnnnnnnnnnnnnnnnnnnnnnnnnnnnnnnnnnnnnnnnnnnnnnnnnnnnnnnnnnnnnnnnnnnnnnnnnnnnnnnnnnnnnnnnnnnnnnnnnnnnnnnnnnnnnnnnnnnnnnnnnnnnnnnnnnnnnnnnnnnnnnnnnnnnnnnnnnnnnnnnnnnnnnnnnnnnnnnnnnnnnnnnnnnnnnnnnnnnnnnnnnnnnnnnnnnnnnnnnnnnnnnnnnnnnnnnnnnnnnnnnnnnnnnnnnnnnnnnnnnnnnnnnnnnnnnnnnnnnnnnnnnnnnnnnnnnnnnnnnnnnnnnnnnnnnnnnnnnnnnnnnnnnnnnnnnnnnnnnnnnnnnnnnnnnnnnnnnnnnnnnnnnnnnnnnnnnnnnnnnnnnnnnnnnnnnnnnnnnnnnnnnnnnnnnnnnnnnnnnnnnnnnnnnnnnnnnnnnnnnnnnnnnnnnnnnnnnnnnnnnnnnnnnnnnnnnnnnnnnnnnnnnnnnnnnnnnnnnnnnnnnnnnnnnnnnnnnnnnnnnnnnnnnnnnnnnnnnnnnnnnnnnnnnnnnnnnnnnnnnnnnnnnnnnnnnnnnnnnnnnnnnnnnnnnnnnnnnnnnnnnnnnnnnnnnnnnnnnnnnnnnnnnnnnnnnnnnnnnnnnnnnnnnnnnnnnnnnnnnnnnnnnnnnnnnnnnnnnnnnnnnnnnnnnnnnnnnnnnnnnnnnnnnnnnnnnnnnnnnnnnnnnnnnnnnnnnnnnnnnnnnnnnnnnnnnnnnnnnnnnnnnnnnnnnnnnnnnnnnnnnnnnnnnnnnnnnnnnnnnnnnnnnnnnnnnnnnnnnnnnnnnnnnnnnnnnnnnnnnnnnnnnnnnnnnnnnnnnnnnnnnnnnnnnnnnnnnnnnnnnnnnnnnnnnnnnnnnnnnnnnnnnnnnnnnnnnnnnnnnnnnnnnnnnnnnnnnnnnnnnnnnnnnnnnnnnnnnnnnnnnnnnnnnnnnnnnnnnnnnnnnnnnnnnnnnnnnnnnnnnnnnnnnnnnnnnnnnnnnnnnnnnnnnnnnnnnnnnnnnnnnnnnnnnnnnnnnnnnnnnnnnnnnnnnnnnnnnnnnnnnnnnnnnnnnnnnnnnnnnnnnnnnnnnnnnnnnnnnnnnnnnnnnnnnnnnnnnnnnnnnnnnnnnnnnnnnnnnnnnnnnnnnnnnnnnnnnnnnnnnnnnnnnnnnnnnnnnnnnnnnnnnnnnnnnnnnnnnnnnnnnnnnnnnnnnnnnnnnnnnnnnnnnnnnnnnnnnnnnnnnnnnnnnnnnnnnnnnnnnnnnnnnnnnnnnnnnnnnnnnnnnnnnnnnnnnnnnnnnnnnnnnnnnnnnnnnnnnnnnnnnnnnnnnnnnnnnnnnnnnnnnnnnnnnnnnnnnnnnnnnnnnnnnnnnnnnnnnnnnnnnnnnnnnnnnnnnnnnnnnnnnnnnnnnnnnnnnnnnnnnnnnnnnnnnnnnnnnnnnnnnnnnnnnnnnnnnnnnnnnnnnnnnnnnnnnnnnnnnnnnnnnnnnnnnnnnnnnnnnnnnnnnnnnnnnnnnnnnnnnnnnnnnnnnnnnnnnnnnnnnnnnnnnnnnnnnnnnnnnnnnnnnnnnnnnnnnnnnnnnnnnnnnnnnnnnnnnnnnnnnnnnnnnnnnnnnnnnnnnnnnnnnnnnnnnnnnnnnnnnnnnnnnnnnnnnnnnnnnnnnnnnnnnnnnnnnnnnnnnnnnnnnnnnnnnnnnnnnnnnnnnnnnnnnnnnnnnnnnnnnnnnnnnnnnnnnnnnnnnnnnnnnnnnnnnnnnnnnnnnnnnnnnnnnnnnnnnnnnnnnnnnnnnnnnnnnnnnnnnnnnnnnnnnnnnnnnnnnnnnnnnnnnnnnnnnnnnnnnnnnnnnnnnnnnnnnnnnnnnnnnnnnnnnnnnnnnnnnnnnnnnnnnnnnnnnnnnnnnnnnnnnnnnnnnnnnnnnnnnnnnnnnnnnnnnnnnnnnnnnnnnnnnnnnnnnnnnnnnnnnnnnnnnnnnnnnnnnnnnnnnnnnnnnnnnnnnnnnnnnnnnnnnnnnnnnnnnnnnnnnnnnnnnnnnnnnnnnnnnnnnnnnnnnnnnnnnnnnnnnnnnnnnnnnnnnnnnnnnnnnnnnnnnnnnnnnnnnnnnnnnnnnnnnnnnnnnnnnnnnnnnnnnnnnnnnnnnnnnnnnnnnnnnnnnnnnnnnnnnnnnnnnnnnnnnnnnnnnnnnnnnnnnnnnnnnnnnnnnnnnnnnnnnnnnnnnnnnnnnnnnnnnnnnnnnnnnnnnnnnnnnnnnnnnnnnnnnnnnnnnnnnnnnnnnnnnnnnnnnnnnnnnnnnnnnnnnnnnnnnnnnnnnnnnnnnnnnnnnnnnnnnnnnnnnnnnnnnnnnnnnnnnnnnnnnnnnnnnnnnnnnnnnnnnnnnnnnnnnnnnnnnnnnnnnnnnnnnnnnnnnnnnnnnnnnnnnnnnnnnnnnnnnnnnnnnnnnnnnnnnnnnnnnnnnnnnnnnnnnnnnnnnnnnnnnnnnnnnnnnnnnnnnnnnnnnnnnnnnnnnnnnnnnnnnnnnnnnnnnnnnnnnnnnnnnnnnnnnnnnnnnnnnnnnnnnnnnnnnnnnnnnnnnnnnnnnnnnnnnnnnnnnnnnnnnnnnnnnnnnnnnnnnnnnnnnnnnnnnnnnnnnnnnnnnnnnnnnnnnnnnnnnnnnnnnnnnnnnnnnnnnnnnnnnnnnnnnnnnnnnnnnnnnnnnnnnnnnnnnnnnnnnnnnnnnnnnnnnnnnnnnnnnnnnnnnnnnnnnnnnnnnnnnnnnnnnnnnnnnnnnnnnnnnnnnnnnnnnnnnnnnnnnnnnnnnnnnnnnnnnnnnnnnnnnnnnnnnnnnnnnnnnnnnnnnnnnnnnnnnnnnnnnnnnnnnnnnnnnnnnnnnnnnnnnnnnnnnnnnnnnnnnnnnnnnnnnnnnnnnnnnnnnnnnnnnnnnnnnnnnnnnnnnnnnnnnnnnnnnnnnnnnnnnnnnnnnnnnnnnnnnnnnnnnnnnnnnnnnnnnnnnnnnnnnnnnnnnnnnnnnnnnnnnnnnnnnnnnnnnnnnnnnnnnnnnnnnnnnnnnnnnnnnnnnnnnnnnnnnnnnnnnnnnnnnnnnnnnnnnnnnnnnnnnnnnnnnnnnnnnnnnnnnnnnnnnnnnnnnnnnnnnnnnnnnnnnnnnnnnnnnnnnnnnnnnnnnnnnnnnnnnnnnnnnnnnnnnnnnnnnnnnnnnnnnnnnnnnnnnnnnnnnnnnnnnnnnnnnnnnnnnnnnnnnnnnnnnnnnnnnnnnnnnnnnnnnnnnnnnnnnnnnnnnnnnnnnnnnnnnnnnnnnnnnnnnnnnnnnnnnnnnnnnnnnnnnnnnnnnnnnnnnnnnnnnnnnnnnnnnnnnnnnnnnnnnnnnnnnnnnnnnnnnnnnnnnnnnnnnnnnnnnnnnnnnnnnnnnnnnnnnnnnnnnnnnnnnnnnnnnnnnnnnnnnnnnnnnnnnnnnnnnnnnnnnnnnnnnnnnnnnnnnnnnnnnnnnnnnnnnnnnnnnnnnnnnnnnnnnnnnnnnnnnnnnnnnnnnnnnnnnnnnnnnnnnnnnnnnnnnnnnnnnnnnnnnnnnnnnnnnnnnnnnnnnnnnnnnnnnnnnnnnnnnnnnnnnnnnnnnnnnnnnnnnnnnnnnnnnnnnnnnnnnnnnnnnnnnnnnnnnnnnnnnnnnnnnnnnnnnnnnnnnnnnnnnnnnnnnnnnnnnnnnnnnnnnnnnnnnnnnnnnnnnnnnnnnnnnnnnnnnnnnnnnnnnnnnnnnnnnnnnnnnnnnnnnnnnnnnnnnnnnnnnnnnnnnnnnnnnnnnnnnnnnnnnnnnnnnnnnnnnnnnnnnnnnnnnnnnnnnnnnnnnnnnnnnnnnnnnnnnnnnnnnnnnnnnnnnnnnnnnnnnnnnnnnnnnnnnnnnnnnnnnnnnnnnnnnnnnnnnnnnnnnnnnnnnnnnnnnnnnnnnnnnnnnnnnnnnnnnnnnnnnnnnnnnnnnnnnnnnnnnnnnnnnnnnnnnnnnnnnnnnnnnnnnnnnnnnnnnnnnnnnnnnnnnnnnnnnnnnnnnnnnnnnnnnnnnnnnnnnnnnnnnnnnnnnnnnnnnnnnnnnnnnnnnnnnnnnnnnnnnnnnnnnnnnnnnnnnnnnnnnnnnnnnnnnnnnnnnnnnnnnnnnnnnnnnnnnnnnnnnnnnnnnnnnnnnnnnnnnnnnnnnnnnnnnnnnnnnnnnnnnnnnnnnnnnnnnnnnnnnnnnnnnnnnnnnnnnnnnnnnnnnnnnnnnnnnnnnnnnnnnnnnnnnnnnnnnnnnnnnnnnnnnnnnnnnnnnnnnnnnnnnnnnnnnnnnnnnnnnnnnnnnnnnnnnnnnnnnnnnnnnnnnnnnnnnnnnnnnnnnnnnnnnnnnnnnnnnnnnnnnnnnnnnnnnnnnnnnnnnnnnnnnnnnnnnnnnnnnnnnnnnnnnnnnnnnnnnnnnnnnnnnnnnnnnnnnnnnnnnnnnnnnnnnnnnnnnnnnnnnnnnnnnnnnnnnnnnnnnnnnnnnnnnnnnnnnnnnnnnnnnnnnnnnnnnnnnnnnnnnnnnnnnnnnnnnnnnnnnnnnnnnnnnnnnnnnnnnnnnnnnnnnnnnnnnnnnnnnnnnnnnnnnnnnnnnnnnnnnnnnnnnnnnnnnnnnnnnnnnnnnnnnnnnnnnnnnnnnnnnnnnnnnnnnnnnnnnnnnnnnnnnnnnnnnnnnnnnnnnnnnnnnnnnnnnnnnnnnnnnnnnnnnnnnnnnnnnnnnnnnnnnnnnnnnnnnnnnnnnnnnnnnnnnnnnnnnnnnnnnnnnnnnnnnnnnnnnnnnnnnnnnnnnnnnnnnnnnnnnnnnnnnnnnnnnnnnnnnnnnnnnnnnnnnnnnnnnnnnnnnnnnnnnnnnnnnnnnnnnnnnnnnnnnnnnnnnnnnnnnnnnnnnnnnnnnnnnnnnnnnnnnnnnnnnnnnnnnnnnnnnnnnnnnnnnnnnnnnnnnnnnnnnnnnnnnnnnnnnnnnnnnnnnnnnnnnnnnnnnnnnnnnnnnnnnnnnnnnnnnnnnnnnnnnnnnnnnnnnnnnnnnnnnnnnnnnnnnnnnnnnnnnnnnnnnnnnnnnnnnnnnnnnnnnnnnnnnnnnnnnnnnnnnnnnnnnnnnnnnnnnnnnnnnnnnnnnnnnnnnnnnnnnnnnnnnnnnnnnnnnnnnnnnnnnnnnnnnnnnnnnnnnnnnnnnnnnnnnnnnnnnnnnnnnnnnnnnnnctcactctctctatacacagatatctcactcatataaaaaatacttttattatatatataataaagtttcgtatgtatatttgtgaatatatatttatttcttcactatatatatccatgtgcgtacacacttacatacacatatatgcacgtgtatgcgcatacgacagattctgagtgtttgacaccgagcaaaaaaaatagagaacaaacaagagcgcgtgtgtaacataatacaaaaacgacaactccacacactcactcacaaacaaaatcactcgctctcacacattctatataattttttttaaatataatatttaaaaaattagaaaaaaagaaaaatatatatatatatatatatatatatttaaatatatatatatatatatatatatatatatatatatatatatatatatatatattctgcaatgtcaattttttttttgaacctattttttagttcaacaattgaggtacgacaatttaaataataaattcttcagcttgtttgtaagcttaaggacattgataatagaatttcagaagttttctcgtcttcattttagttcatacccacgttattctcttttctgcatttaatttgcttgctgtcaaagacttggcaacttgtcattgtttaaacatttgttgcattgttaacatagatgtatcctaacttggtaaatgtttgtcttaacttacaaattctttcacaaaaatacctctgaaacttattctattttttcataattaatttcttatttcggaaactgcaatacaaatgtttgctgagtagtcaaactacaccttaagtactgttggggtttgatcagaacctaggatcataggtcgtaacacaaattttaggttcttaatcaatgtgccgtataaaaaaaaaaaattctatcttatttaatagtactatctgaaagaggttgtcaatttctctgtatatttaatcttatccaatttacagaataaaacactcatatatggaagttttttgaggaactgcacctcccaagccataagccataagccataattctctcacaattgacaagataatcctttcactccatctctcctcttatttataagcaatctgccatacttcttctctacctaagctcaacaaacaggtatcaacaattaacaaactaacgaactgactaactctaaatactaacagatattcttttaaaacgtattagatggaatgttactaatgccttttaattatgagtaattatccaataaatgagttaacttaaaatggaatattcttaacacactttttaaacggtcaaagaacaatcatttaggtagtatagaaagagttggtgagggataattgtagagcataattgaggaggtgatgacacataagcaaatagtgtggtgtggcaatatatacttgacatggcagccacgcagcatattgtcttgtagcttaatatttatatattataaatagatagatagtgtatgcatcaaaggttgctagcatgacatagttggtgtagtgacaactgacagagttgggaagcaaagtacaaaagttcaatgttgagaattattgtccacaaatctgcgctcacatgcatctggtgtcaaatacaaagatgactcaacggtacgcgttgaaatgttgaatgctccttccgaaagtgatctttaaaaaacttaaaatctcataaactttttcgatctcctgtgttctgtcctttggaatttcaaaattaggaggtgaaaggacgaaatctgctgtgtgtgtgaaagttgttgtcatttcataacttgttatgccgaaattgaaattatgataagatgaattggaaagaaaacattgatccactggaatgtgaaaggaatttaaaaagtccacaggaattagaaaaaaaaattgtagaagatgtggccgtacaagaggacttgatcataaaaaaactcaagtaagggtcattcaactgagaagaaaaaataaagcggttgctaaaagataaagtcatgaagttacaagcctaaaacaagaaagtcatggtataattaatagaatcatttggttacttagagaccaagttgttcttggattataaaagaaactcgttaccctcaaagagggggacgaataaagaaggaaaattcagtgaaggggcatgtatttgttttattccatttttctgttgttagaaagtgatgaattattttccttgtagtataaaaattccgagtttatgttctttcttaatttatattgcttgtttttaaataaaaataatttaattttaactcattcaattgtttgtgacattaaaagagtagcactcctactttttgatgttgcttaatcataaaatttaattgaataatcattaatttgttatcttaaaagttcatagtttttatttataaaaaattgattcaagtatcaatcaataacattacaaataacaattctatcttcaatattattggattgtgagggtctaatgaataatcattttgctagcttaaatccttgtgctacattttttcttttgataaaaaattaaaaaaaaaattctttaaaaaaaatcaaatgtgctctttttaaaataaatgaaaagaatgttttggtgtaaaataaatatatataaaattataaagattttgtgcatttaaatataggttccatttttttaatggacactttagggtgtcaagacctttcctaatccactccccaacctattttttgttcagagaccattattttttgaggatttttcaatgtttacgtgtgtattctggtcacgtaaactttttcttcctattctttaggcttgtcaaatagatagattaaataatttttttattagattacagtggatggattattaaaagcaatccgttaatcatttatgatctattaaaaagtcggatagtaattattttgtttatcttttaattagaataccattctgttaaacaatcagttaatcaatttagcatctattgagaatactatatatttctgtcaacagttcataagaaaaaatgatgcaggtttatcttttatcctttccataagattaatttatcttttagaataatctatcgtttagtttatttatttttagattaatttatcttttagtttactttttattcgtgaacacacatattcaaataaataaataataaactattcaacctattctttaaaaagatattataaaagataaaaaataaactaagagattaatcatcgattatatatccgttgaatgaaattcatccaattcatcttatttataagcctttccctttacttggtcatcctcataactcacaagccacgatggtattcatctttcccttcctttaattatgcgattcgttacaatgcaaagtatttctagcttttcattttctgatactgctatatattgaaaacgggatattggaaacgatttttgttttggtttttcacccatgatattacattattaatgctgtacatgattcatattttatggacaacacaaaatgatagaataaacataaaagtcatttcttgttgggttacaaatgggttggggttgtatatgtgtttctctcatatccttcagaattcttgttgttattgctaacaacaattaacttttattcttctttttggacaactatctctacttttttggaacaaaaaattgcatgtgaagttatcgatatcagtattatctaaaataaaaaattgaagcatttgtacgtctaacgtttttgtggacaggcaccaggaaaaggaaaagaaacatagggggaattggtggtgaggagacagaggaaaattataagaaatactaaagatgatagggacaggatcagtgagttacctattcacgttttcctcagaataatattggaatttatgaacacaaaagatgttgttcggctttctgctttgtctaaaagttggaaggatttttggaaacgtttaactactctcagttttgattcttgggagtcaagtattttcaattgccacaagtttgtgttcgaggttttgtctggtcgagatggttaattccattcctctacttaatcttgagatcattctccgcaccgacctcgaacaactagatgatatatatcctgaaatatggcgtgtctcacaacatccagcaattgaaaatctttctttttgtgaaccatagattccatttggtgtttccctcttctattttttctgtccaactatgacatctcttcgcttttccccttcctgaaaatatgctgtgttaaagtcctttggattaataattctaacccggatcttgcttaccctattgatggttacaaaattgtgttttcaactccgagtcttggttttctcactatcaacaatgttcatcatggtcaccaacttccctccacgtgtaatctttcatctcttgaagtagatattaatgtcagtgtttcgccatgttctccattctttaaaagtttgttccaagtgcttgctaatgttaacaaattgacactttcttggaggaccctaggatgatgctatttttaatttttactttgtatgttttgtctttttcggtatgtgtttgaaagtattttttttctctacgattttaaacttattatctattctaataaagtgctgaaagttatattcctatttcttgcttaaataatttagtaaatatttcttttatttccctttctttctgatgctctcttgaaagaaactataggatgttatatatattgtggggagtgaaaaacacaaacttttcttatatattcttttgaacgtttacttaaaattcttaaggtgaagatttttttaaattgtttagttttttatttcattttattattaacttattccttttttttttcggtccaagattaacgtattcccttatgctctcttatattagattatagattgttacactgtgagtgctctgtttgctctgtttgttatatatgttgtttttaattgactttcacgtaagatgaaagtttttaattataagaaactattagagtgaagcaggggaacaaaaatcttgcattgatattaagaaatacattctttggtgatgcagaaacaatgttgtgccatttgcagagcattatttgagaaaatagtatcaaataacgacataatcaattggtgtcgtttgtgtgtgtaaaatacaaaagcaagtagcatagcaagagcaggagtttgaataagaaataaatgttgagcatgttaaatcaacaaaacaaaattgcaaataatgatttaacaatatggcagaaaacaagcatgtgatccaacactaaggtagaaaataaaagcatatcagtcaaatggcaagccaggacagaaaaatatttatttagtactttgcatagactaatagtgattaggaagggaaggtggaatctgggtttgtggagtaggtctaaattcctaataatttgcatataatatttccgttatgtatttttaatatttgttaacatgtttgtaatcttttgtttattgcaatcaattacttatctcattttatgcacatgtaagtagtaaatttataaaatatttttgtcaattttataagttagttgtttttgaaggaaaatgaacattggggaagttgaagtttccttgctgagctgtagtcttaacaaattcctaacaacaaacctacaggaatatttcctaccagttagacgtagaataaccaattgatatccttggaccttgggaaaaataatctttgagtaactattccaacataatgcagtgacatgtggttcaagttgaagaagtcagcccttaatatggctggactttgtggattgtccaaaggttcaaggtgaaaaaacggagcaccttgagatggacttgatggagtgggctatgggttgggatatcatgaactagtacacttgattttttttttttaaatgttgaacttttattgtttacataacaaaaatttaatgaaaggattgattataatagttaaaatttgaattttaatgacaccaaattttcattttaagcagttctattgaagaaaggcacttgcggcagtataaataataaaaagaagtaagtttaatatgcagaagcaagaagcacttatacaattgacttgtttcatatatgtgttgcatgatcatgaattcctccattatttatgcgttgcatgcttgaatctctcttgaaatgagatttcaaatattcacttgttgttgggtaatgaaatccaaggtccgattccctggtggtattcgaaacctcactttttcaaaatcttaacttgtccaaaagttcattctaatattctatacctgattggttatacggtcttcgtcatctcaagtatctggacctaaggtacagcaacttgcataggactatttcttatgttctaggaaaattttctcttgttgaacttgatttatcaatcaatcaacctgaagcaaccattcgaacttctttgggtaatctatgtaacttaagggagattgatttctcatatctcaaactcaacaaacagattaatgatattttagaaattctagctccttgtacttcccatggactcacaacactttcaggaaatttgacggtttgttaccgttcaggggcaaatcttttccattttttaccatatggaagtattttcttaaattattttttaaaagaggataagttgtattagttgttactgagttagaggtcgtgatatcgattatgatttttttttttttttaacggaagtcataaaattatttatgactttaatgtcatttttttatctacaactttaaagttattatttttttaaaaaatttatgaattcaaagttgtaagtgtgacaccctttaccccgacatatatataaataaataaaatatataaaaatatcgataaccaaattcacataggtaaaaggttcacattcacttcactattatcaattaaaacttattaaaacatattcggctcaaaataaggccgtcaaaatttacaaaaatatttttgttaaatcagtgagataaaataaagtagactaacatcatgcaattaatataaaacttatgtcccacagtcacatcctatcagagcattgtgtcccgacgtccttcagcacaaggtttcttaaatcacttcacctagccatctgctcccccgtatataaggttaaagatcatcataggatccaaacacaaacaacacacaagaagtgagttatcacattcctaactaatagagaaaaataaaacaacatatagatataaatattatataacaaaatacaatttacttgagcataactcacgttatttcaccacacgtctcattcgttttcacaacatttgcatactcaatagtcaaaaacacaatatcatcaaatcaatcaatatagaacaatacacaagcattatacagcagatatactaagactcaatcttatatgcaatgtagtaccatgtcagtgaaaaatctcgtcgcccttaaagggtcttaacattaactcatcgcccttaaaggctcttaacattaactcattgctcttaaatggtcttatagtcgtgtgattgtacaatctatagtttacaacttaaatgcacacaacatctcaatcatgtgcatactcagtttatcacatacactcaatctcaattacaatgttataatatcaaaatagcatgttgtcacacctcctgaatcatattcactttacctatgaactatgcaatacttgacatggactatgtgaagtgtcctaaggttcaagatgaaaaaatggagaaccttgacatggacttcatggagtagtctatggttcaagttggaaaagtggggaccttgatatggattttgtggagtggccagccgtttgtctaggagaaaattttgtttttcatttcttttattttgaatgataaaaaattgatagtttaaaattaattatgagttcaaattgcaagtaatagaatatttgaattttataatgcaagactttttcttatttacttaacacaggtgtaacaaaaggatttgatgtaagctactcaaatattaaaagaattattaatattttcgtaagataaatttttcattgatttaagaaattatatatggtaaactaaaataaaaaatattcattattttagtatttggcacaagaataaattatatttctttgtagattgtttaagttattgtatgaatttgttttttttttttagaatattaaattgaacatgagtatttttatgattgtttaaatttggcacttgcaattatttaaaaagtaaaatggaaattaaaattatgtttctcctcttatttacattgatatcttgtaaaaaatacaaaatacgatactggtttttttgagaaaaaaaagttaatattctttttcacacttctttttatataactaattaatttttatatgataaagaaaataatattcaggtttgaatacaattagaaatacatgacacgacaatctttccaattgatgacaattaaatttagtctttttttcatatataagagaatattattttgtgaattgaaaaattgatcaaaattaaatagctagattgtaacaagagaatctttttttttatatagatttttgaactgaaatagtctttaaagtacaccattttcctataattgatttattcatcaattatatattttttttcttgcttgacgtaacttgcaacatttgttgtgaatgacaaggaacttgataggaagatagtgcagtgacctacggttaaagttgaagaagtcagaccataacatggatggactttgtggagtgtccaaagggttcaagatgaacaaatggaaaacctctagatggacttatggggtgggctatatatgtttaatttagaagacaattttcttttacattatttttagtttgaatattgaaaatttaataatttaatattaactatggcttgggatatcatgaaatagaagacttgattttttttttttaaaaattggacttttattgtttacgtaacaaaagtttaacgaaaggattgattaaataatagttaaaatatgaagtttaatgacacaaaattttcatttaagcagttctatagggtaaattaaaataaaatgattcttatttatttttgtaaaaaaacctgtaccaaaaagaatgtttcttattttagtattcagcacaagaataaatcatatttctctgttattaattttgatttcttttatgaatttagtgtacataggaattttaaaaaaggagatagatacagtaaatgcataatttttcgtattctaagaattaattcgggagaattggataattaagtcgataattttaaaaagccagcttaaaaaaagaagtgaattacaatgttaaaaaaatattttagtatttggcacaataataaaaaaaggaaaaaaaataatgaaagtgaagaaaaaaataggcttaaaatataattgttgtcttttttttaatatgttattttatttttttattttttaatttaaatattttatctcttatttttttaaaatcttgtaattttagtctttttattttttaattgagatatttttaaaaatatatgtcattttagtccatttgatcaaattcttgttttttaattaggatattttgtcctttaaaagttagagacaataatatcgctggactttgtggagtgtccaaaggttcaagatgaaaaaatgaaaaaccttgagacggccatggtttgtttagaagataattttcttttacattatttttagtttggatattaaaattttaataatttaatattaattatgggttgggatatcatgaaatagaagacttgaattttttttaataaaatgttggacttttattgtttaattaacaaaattttacgaaaggattgatcaaataatagttaaagtcaataattaaaaaaggagatagataaagtaaattcaaaattatttcctattctaagaattaagtcggaagaattggataataaagtcaataattaaaaaaaggcaacgtaaaaaaagaaaaaagaaaagaaagacgcttgcatcagtataaataatagaaagaagtaagtttaataagcagaagcaagaagcacttatacaattaagctgtttgatatatccttgtgtgatcatgaattcatcctccatttatattcttgtctttgtccagctttggttgttgagcttaccatgcagagagagtgtgtgcatcccaagtgagcgtgagacacttttgaagtttaagaataatctcaatgatccttcaaataggctttggtcttggaatcataataataccaactgttgccactggtatggagtcctctgccacaacgtcacttcccatcttcttcagcttcacctcaacactacgttttctgctgctttctatgatggctactatcacttcgatgaggaagcttatgagaaatcccagtttggtggagagataagtccttgtttggctgatttaaagcatttgaatcacttgaacttgagcggcaattatttccttggagcaggtatggcaattccttctttccttgggacaatgacttccttgactcacctcgacctctctcttactggattcatggggaagattccatctcagatagggaatctctccaatttggtctatcttgacctcggaggttattctgtcgagcctatgttagctgaaaatgtagaatgggtatcaagtatgtggaagcttgaatatcttcatttgagttatgcaaacctatccaaagcatttcattggctacacactctccaatctcttccttctttgacccacctagatttgtcaggatgcacactccctcactataatgaaccatccttgctcaacttctcatctctgcaaactctccatctttccttcactagtttttcccctgccatttcttttgtccccaagtggatattcaaattgaaaaaacttgtttctcttcaattatggggtaatgaaatccaaggtccgattcctggcggtattcgaaacctcacacttcttcaaaatcttgacttgtctggaaattcattctcatcttctatacctgattgcttatatggtcttcatcgtctcaagttcctcaacctaagggacaaccacttgcatgggactatttctgatgccctgggaaatttgacttctcttgttgaacttgatttatcaggtaatcaacttgaaggaaacattccaacttctgtgggtaatctctgcaacttaagggacattgatttctcaaatctcaaactcaaccaacaggttaatgaacttttagaaattcttgctccttgtatttcccatggactcacaagacttgcagttcagagttcacgactttcaggccatctgacagatcatattggggcatttaaaaatattgacacgttacttttttccaacaactcaattggtggtgctcttcctagatcatttggaaaactttcataattaagatatcttgatctgtctactaataaattcagtggaaatccatttgaaagtcttggatcactctgtaaattgtcatctctttatattggtggcaatctttttcaaactgttgtcaaggaagatgatcttgcaaatcttacaagcttgatggagattcatgcatcagggaacaatttcactttaaaagtgggtcccaattggcttcctaattttcagcttttccatttggatgtgagatcatggcagttaggtcccagctttccatcgtggattaagtcacaaaacaaacttgaatatttagacatgtctaacgcagggattattgattctattcccacacagatgtgggaagcacttcctcaggttttgtatttaaacctctctcataatcacatccatggtgagagtgggactacattaaagaatccaatatctatccccgttattgatctaagctcaaatcacttgtgtggtaaattaccctatctttcaagtgatgtgtctcagttagatctttcaagcaattcattctctgaatccatgaatgactttttatgcaatgatcaggacgagccaatgcaattacaatttctgaatcttgcatcaaataatttgtcaggagagatacctgattgctggatgaattggacatttcttgtgaatgtaaatttacaaagcaaccattttgttgggaacttaccccaatccatgggttccttggcagagctgcagtctttacaaattcgtaacaacacactctcaggaatatttccaaccagtttgaagaagaataaccaattgatatccttggaccttggggaaaataatctttcaggatgtattccaacatgggttggagaaaagctcttaaaagtgaaaatccttcgccttcgatcaaacagttttgccggccacattccaaatgaaatatgtcagatgagtcatcttcaggttttagaccttgcagaaaacaatctgtctggcaatataccgagctgtttttgtaacttgagtgccatgacactaaagaaccaaagtacagatccttctatctattctgaagcacaatatgttggtagctcttactcttccatctatagtatggttagtgtgctactatggctgaaaggaagaggagatgagtatagaaacattctgggtttggtaacaagcattgatctgtcaagtaacaaattattaggagaaatacctagaaaaatcacaaatctaaatggattgaactttttgaacttgtcccacaaccaattgattggtcatattccacaaggcattggtaatatgggatcattacaatccattgatttttctaggaatcaactttctggtgaaatccctccaaccatttcaaaattgagctttttgagcatgctagacgtgtcttataatcatttgaagggaaaaattccaacaggaactcaattgcaaacctttgatgcctccagctttattggcaacaatttatgtggtctaccactgcccataaactgcagctccaatgggaaaactcatagttatgaaggaagtgatgggcatggagtgaattggttttttgttagtgcgacaattggatttgttgtgggattctggatagtgattgctcctttactgatttgtagatcatggaggtatgcctattttcatttccttgatcatgtgtggttcaaacttcaatcttttcgctcaggtagtatcactgtttagtgttgcttagaatactccgatgttttatcattgtattggcaggttgatcaatttatgtcaacaaataaatttaaacaaactaatccattatatttcaattttcagtaatgttatatttaatggataagagttgtaccgtgggaattgttgtcattgcatctacatacacaagtgtatctatttttttttaagttatgtttctttgaaatttattcatatgtttgaatctctcttgaaatgagatttcaaatattcccttgttgttgggtaatgaaatccaaggtcgatccgattccctggtggtattcgaaacctcacacttctttaaaatcttgacttgtctaaaaattcattctcatattctatacttgattggttatacggtcttcatcgtctcaagtatttggacctaaggtacagcaatttgcataggactatttatgatgtctggggaaatttgacttctcctgttgaacttgatttatcaattaatcaatctgaagcaaccattcgaacttcttggggtaatctcagcaacttgggaacttgggggagattgatttcttatatctcaaactcaaccaacaggttaatgatattttagaaattctagctctttgtatttctcatggattcacaacacttgcagtttcgagttcacaactttcagtcaatttgactgctttttaccattcagggatatttttcaaattattttccataaaatgactctttttaataaaaaaagtcttatcaggtgctactatatgagttagaagtcataaaatgactctttttaatcgaagtcataaaattatttataattttaatgtaattttttttatttggaacttcaaagtcgttaatttttttttattttacaactagtctttttttaatttttttaacttaagactttaaaattgtaagtttaattttttttatttttatgacttttgaaattgtgtttcgttttttttttacgtttaaattttttaattttagaattttttacttacttgtattttattttttatttttttcaaaaattataaaaaaattatttatttaattattaagtaaatattttatttattcatttaaaaaataaaattctataacattatttaaaatttatctaaattttaaatatgtaaaatatattaaataaaataatattaaaaaacataatatattttaaataaaaaatattaaaaaatatataatatatttaataaaaccataaaaaatataatacaaatcaaataaaactaatagtatgaaaattttccattttaattattttttatttatcacatttggtttatttaaaatttagataatcttttaataatgtcattgaattttttttaaaatgaataaataaaatatttatttaataattaaataaataaaattaataacattttaaaaaaatgtaacaaaataaaaaataaaatacaagaaattaaaaaattaaaaaattctaaaattaaaaagtttaaacttaaaaaataaccaaaatgactacaaagtcgtaaaaagaaaaataaaataaaaaaacaaaacttatcactttgatatcataataaaaaaaactattgactttgaagtcgtaaaaaaaacacaaatattgtaatccattaccggcttcaaaatttgaattcaaatttctaaaggatgttacaaaacgtttaaacatggtaatcgattacaagccttgtgtaatcgattataggctttaaaattaaattcaaattttataagagcattttagaaattaatttgatcacgggtaatcgattacatcccctgataattgattaccagagagtaaatattacttttatgattatgtatgtttctcttagtcttaagacttgattaccagagagtaaatatcttggaagaagtgttttgagaaacaaacgaaattatgattatgtatgtttctcttagtcttaagacttgattccaagatgaatcgcagttatttgtttgcttattttgggcatgcttgcatatttttctattatgttttttttttcattttgtaagagctgtttcaaaaatagtggagtatttattttctagtagttttagacttcagtccaagatgagttacagttttttttttttttactttattttgggtatgctagtttttgctgaagcaaagtgccacattaattttgaatttgtggtttgcatgggtcgaagatttatctatgaattatgaggcaggaagggcataagtggaacaagttaaccaaggtgcagcaggtgaaagaaggctgcaggagtcatctaattgaagaagggctttgaaggagtctttgctttgggtgattgtgtagattttcttaaaagctgtttctatatctgtttctatatttgtgttttttttaatgtttatgtaaatatccaattttttccgggtttagttttatcttttaaataaaaatatttaaaatatttttgagaaaaagaaaagaaaaattatatatagaagatttgacagttacaagaagacttggcatcagaaaactggagtaatggtgattcaattgagaaaaaaataaaatattactaaaagataaggtcatttaaaatatttttgagaaaaagaaaaaagaaaaattatagaagattcttttaaataaaaatatttaaaatatttttgagaaaaaaaaagaaaaatcatagaagatgtgacagttacaaaattgatattcagaaaactggagtaatggtgattcaattgagcaaaaaaataaaatattagtaaaagataacgtcatcgaagttgtaagtctaaaaacaatggtataatggaatcctaagttgttcttggattataaaagaagagacgcactagcatacaaggagggggacggagaaaaaaggagaattatgtgaagacccatagaaagatttttttcgcaattctttcaaaagatgattatgatgctataagatcaggtccttgttcttttttctctataagatcaggtttgttcttttttttcttttctcgttcatttcttgttatgtttggttttttgatttaatttttggtttcatgaattcgtgtatgtatgctatccaaatgtttattttctgaataaaataagtatatatattttgaccacatgtttaccttcatattatgggttaaaaagcatcattttttattacttattggtcccccgataaatatttattttttatgtttggtctctaataaatttttttgaaaccggattcctaatatttgaaattttgtctcttatatttgttgttagtcccaaattattatctacctatgtggttgtttgaccatgatgtatgtcacgtgtggtgtcacttgtttgatttggattacacgtgagaaaaaaattttaaaaataaaaataaaaactatgtcgtattgtccccttcttctttctcctttctgtctccatcacccttcatcttccttatatctcaccattgtgccacggatggtgtttcattttctcccccagtggatggactaaaggaaaacaagctagatgaaagaatagatataaatcaacaaaatcttaacaacaaaacatcaaaccacaaaatgagaaaagaaaaattgtttggtgggcttcactaaggttcacggctggattggtagttggacttcatgtggggtttcacaatgaggtttgccatgagttggggctcattgagtttggcagtgacagtggagatcacagtctttgggttttatgatgggattgtgcacgcgcggttgagatcacagttgggctcctaccaatatttctaccctatgaataaagataaagaaatttctacactatgaatatttggaattaattaagattagctaattcaatctaaataacaatatgcaaaaagataaagaaattaagagaagaaataaaaataagaaacttaaggaaggaaataaaagaaaaaattaagggaatttttgtttgagaattttaacaaacactcctgtatgcaaagtaaattgagattaaatcaatgaaaaaattgtctaggtttaattttattggagttcctataaagtaatcactacacatttatatttaataaatgttatatcatcactaatctaccatattatcttaactttaattcattaagtgaagaaacctaaatctcttgattaaactatcgattccttggattggcataaccaaaggatttgcattaagacaaagtgtttattaatgttctattatccctagacataaaaattattggatgttctctctaattcgctactcagaaatttttctattacaattgaataaaaaatcatccaaacatgtgttcaagtcaaaaacacatatcagacatataagaaaaacaattacaatattttactgaataaaaaagtaatcatttcatgaaagaagaaccaattactgtacattaaactctaagagaagattaattcatggcaaaaaaaaaaaaacataagagatatacatcacataaatgtcttaaaatgacaccaaaatctaagaatacatgataattatctatcatccaaatttaatttaggataaaaagtaacattaaaattttatagggacaaaaatgatatattttactctatctttttcatgcttaaggtaactctcaacatttgttgtcagtcataaaaaacattgacatggatctgatggagtggcctgtggttcatgttgaaaaagtagggaccttgatatagatttggtagagttgtctaaggtttgtctacaagataatttttttcttttattttatttcaaataataaaaatttgataatttcaaattaattatagttttaaattgcaagtaatagaagacttgaatttaataatgtaagactttttgttgtttactttacacaggtgcatgtaacgaaaggattgatttaaataattgttaaaatttgaagactcattattataccaaattttattacctttattgtaaactacaaatgattttttataaaaatattaatatttacttaaaataaaattttcattaatttaagcaattctacacgttaaactaataaaataaaatgtttcttattttagtatttggcacaaaaataaattatatttctttgtagattatttaagttgtcgtatgaattatttttttagaatattatattgaaggtgagtatttttatgattgcttaaatttggtacttaaaattatttaaaaagtaaaatggaaattaaaattatgttgctcctattatttaaactgataacttgtaaagaaaataaaaaatatgatactaatttttatgataaaaaaattaatattcattttcaaattaattagaaatagacaattaacacaaacaatctttccaaataatgataatgaaaactgaaaaacgtatgcatgaagaatgtgaatcttccataagttagatagttcaataaattgtatatttatttttctcttctatcactattcttaaaatgccaccacataagtaaatgaaattcagacaaagactttaatatatgaagacttgtggtctaacaataaaatagctaggaccatatgtaaataatttaaaaaacatgccacacttcttggtagatcatatcctctaatttacactttaagttaaatatgatctacaatacatggagaaatttggaccaagacttataaaaggaaaaactatgatctcaataattatgatagaccaagttaaacaagcattttacacttctttatatttcactaattaatttttaatgaaaaagaaaataatatttaggttaaaatataattagaaatagatgacacaacaatctttccaattaatgaaagcgaaaattaatcttttttcacatataattgatgtattcatcattcataattttttccttgactacttaattttaagcatttgttgtcaattataaggaacttgatatgaaggtaatataatgtagtgacctatgattcaagttgaagaagtcagaccctaacatcatggctggactttgtggagtttccaaagggttcaaaatgaaaaaaaatggaaaaccttgagatggacttgatggtgtgggctatggtttagaagacaattttcttttacattatttttagtttcaatattaaaaatttgataatttaatattaattatgagttgggatatcatgaaatagaaggcttgaattttttttaaaaaaaaatgttggacttttattgtttacgtaacaaaagtttaacaaaaggattgattaaataatagttaaaatttgaagtttaatgacaccaaatttttatttaagcagttctatagggtaaattaaaataaaatgattcttatttatttttataaaaaaaactgtaccaaaaagaatgtttcttattttagtattcagcacaagaataaatcatatttctttgttattaattttgatttttttatgaatttagtgtacataggatttttaaaaaaggagatagatacagtaaatgcataatttttcgtatttaattcgggagaattggataattaagtcgttaatttaaaaaagccagcgaaaaaaaagaagtgaataatattttagtatttggcacaacaataaaaaaaggtaaaaaaaataatgaaagtgaagaaaaaaacaggcagggcagcagtataaataatagaagtttgatgatttatatgcagaaccaacaactacacttgttttctatatattcttgtgtgatcatgaattcctcctccatttatattcttgtctttctccacctttggttatgtaggttaccttgcagagagagtgtgtgcatcccaagtgagcgtgagacacttatgaagtttaagaataatctgaatgatccttcaaataggctttggtcttggaatcataataataccaactgttgccactggtatggagtcctctgccacaaccttacttcccatcttctccagcttcacctccacacttctgattctgctttctatcatgatgcctaccattatcgattctaccatagattcgatgaggaagcttataggagatggagctttggtggagagataagtccttgtttggctgatttaaagcatttgaattacttggacttgagcgccaatgcatttcttggagaaggtatgtcaattccttctttccttgggacaatgacttccttgactcacctcaacctctcttatactggattctatgggaagattcctcctcagattgggaatctctcaaatttggtgtatcttgacctgagttatgttgttgccaacggaacagtaccctctcagatcgggaatctctctaagcttcgatatcttgacttgagctacaattattttgaaggtatgacaattccttctttcctttgtgcaatgacctccttgactcacctcgacctctcttatactccattcatggggaagattccatctcagattggaaatctctccaatttggtctatcttggcctcggaagttatgatttcgagcctctgttacctgaaaatgtagaatgggtatcaagtatgtggaagcttgaatatcttgatttgagtaatgcaaacctatccaaagcatttcattggctacacactctccaatctcttccttctttgacccacctatatttgttagaatgcacactccctcactataatgaaccatccttgctcaacttctcatctctgcaaactatcgatctttccggtactagttattcccctgcctttgacttctcttgttgaacttgatttatcaaataatcaacttgaaggaaccattcgaacttctttgggaaatttgacttgtcttgttgaacttgatttatcagctaatcaacttgaaggaaccattccaacttctttgggaaatttgacttctcttgttaaacttcaattatcacgtaatcaacttgaaggaaccattccaacttctttgggaaatttgacttctctggttagacttgatttgtcatataatcaacttgaaggaacaattccaacttctttggctaatctctgcaacttaatggagattgatttctcatatctcaaactcaaccaacaggttaatgaacttttagaaattctagctccttgtatttcccatggactcacagcacttgcagttcagagttcacgactttcaggcaatctgacagatcatattggggcatttaaaaatattgacacgttacttttttccaacaactcaattggtggtgctcttcctagatcatttggaaaactttcatcattaacatatctcgatctgtctattaataaattcagtggaaatccatttgaaagtcttagatcgctttctaagatgtcatctcttcagattgatggcaataattttcaaggagttgtcaaggaagatgatcttgcaaatcttacaagtttgatggagtttcatgcatcagggaacaatttcactttaaaagttggtcccaaatggcttcctaattttcagctttcctatttggatgtgacatcatggcagttaggtcccaactttccatcatggattcagtcacaaaaccaacttcaacactttggactgtctaacacggggattttagattctattcccacctggttctgggaagcactttctcaggttttgtatttaaacctctctcacaatcatatacatggtgagattgggactacattaaagaatccaatatctatccaaactattgatctaagctcaaatcacttgtgtggtaaattaccctatctttcaagtgatgtgtttcagttagatctttcaagcaattcattctctgaatccatgaataactttttatgtaatgatcaggacgagccaatgcaattaaaaattttgaatcttgcatcaaataatttgtcaggagagatacctgattgctggatgaattggacatttcttgcggatgtaaatttacaaagcaaccattttgttgggaacttaccccaatccatgggttccttggcagacctgtagtctttacaaattcgtaacaacacactctcaggaatatttccaaccagtttgaagaagaataaaaaattgatatccttggaccttggggaaaataatctttcaggaagtattccaacatgggttggagaaaagctcttaaatgtgaaaattctccgccttcgatcaaacagttttgccggcctcatttcaaatgaaatatgtcagatgagtcttcttcaggttttagacgttgcacaaaacaatctgtctggcaatataccgagctgtttcagtaacttgagtgccatgacactaaagaaccaaagtacagatcctcgtatctattctcaagcacaatataatatgtcttccatgtatagtatagttagtgtgctactatggctgaaaggaagaggagatgagtatcgaaacattctgggtttggtaacaagcattgatctgtcaagtaacaaattattaggagaaatacctagagaaatcacagatctaaatggattgaactttttgaacttgtcccacaaccaattgattggtcctattggtaatatgggattgttacagtccattgatttttcgaggaatcaactttctggtgaaatccctccaaccatttctaatttgagctttctgagcatgctagacttgtcttataatcatttgaagggaaaaattccaacaggaactcaattgcaaacctttgatgcctccagcattatcggcaacaatctatgtggtccaccactgcccataaactgcagctccaatgggaaaactcatagttatgaaggaagtcatgggcatggagtgaattggttttttgttagtgcgacaattggatttgttgtgggattctggatagtgattgctcctttgctgatttgtagatcgtggcggtatgcctattttcatttccttgatcatgtgtggttcaaacttcaatcttttcgctcaggtattatcattgaagggaaaaatgccaacaggaactcaattgcaaacctttgatgcctccagctttattggcaacaatctatgttgtccaccactgcctataactgtagctccaatgtgaaaactcatagttatgaaggaagtgatgggcataggtcagttgcttaactttgaaattgatcccttggtgcttgaatttctcttgaaatgagatttcaaatattcacatattactgggtattacatccatttccatccaattatgagtgcatattagaattggctgcctttggagcaaatttgtttccaacaatgacgaaggtgattgtagaagattggtaggaggaggttggggtttccgtgtgctatgtcctacgataaatctgcaggcataaaagaatccaacggatataaaaataaataaatcattttacagagtgatctttaaaaatgaaattctgataagaagattgtgataaaaaacatggtggtgaaaataataaaaaacatacagctgccaaatttgtttccaacaatgacgatggtgattgtagaaggttggtacgtaggagggggttggggtttgggtgtgctatgtcctacgataaatctctaggtataaaagaatccaacggatgtaaaaaaattgttcacagtggatcacttagacttcgtctcttttacagagtgatctttaaaaatgaaattctgtattcatgtttgcgtgttgaatgtttcttctttcacggtggtctttaatcaaaatagtatttaaattagacccttttcctataattgatgtatttatcatttatatattttttgtggtctatgggctatggttcaagttgaagtcagagacaataataacatggctggactttgtggactgtccaaaggtttaagatgaaaaaattaaaaaccttgagatagacttgatggagtgggccatggtttgtttagaagacaattttcttttacattatttttagtttgaatattgaaaatttgatacaacaaccattccaattaatgacgattaaatctagtctttttttttatatataagagaatattattttgtgaattaaaaaattaatcaaaattaaataactagatatgaacgaaataatcttttttatatagattttttaatcaaaatagtctttaaattagacccttttcttataattgatgtatttatcatttatatattttttgtggcctatgggctatggttcaagttgaagtcagagacaataacatagctgtactttgtggactgtccaaaggtttaagatgaaaaaattaaaaaccttgagatggacttgatggagtgggccattttgtttagaagacaattttcttttacattatttttagtttggatattgaaattttaataatttaatattaattatgggttgggatatcatgaaatagaagacttgaattttttttaataaaatgttagacttttattgtttaattaacaaaattttacgaaaggattgattaaataatagttaaagtcaatacaaaattttgtgtatataggatttttaaaaaaggagatagataaagtaaattcaaaattatttcctattctaagaattaagtcgggagaattggataataaagtcaataattaaaaaaaggcaacctaaaaaaaagaaaaaagaaaagagagacacttgcatcagtataaataatagaaagaagtaagtttaatatgcagaggcaagaagcacttatacaattaagctgtttgatatatccttgtgtgatcatgaattcctcctccatttatattcttgtctttgtccagctttggttgttgagcttaccatgcagagagagtgtgtgcatcccaagtgagcgtgagacacttttgaagtttaagaataatctcatagatccttccaataggctttggtcttggaatcataataataccaactgttgccactggtatggagtcctctgccacaaccttacttcccatcttcttcagcttcacctcagctcttcagattatgctttctacgatgaggaagcttatcggagatggagctttggtggagagataagtccttgtttggctgatttaaagcatttgaattacttggacttgagcggcaatgattttgaaggtatgtcaattccttctttccttgggacaatgacttccttgactcacctcaacctctctgatagtggattccatgggaagattcctcctcagattggaaatctctcaaatttggtgtatcttgacctgagttctgttgttgacgacggaacagtaccctctcagatcgggaatctctctaagcttcgatatcttgacttgagcgacaattattttgaaggtatggcaattccttcttttctttgtgcaatgacctccttgactcacctcgacctctcttctggattcatggggaagattccatctcagattgggaatctctccaatttggtctatcttggccttggaggtagttatgatctgttagctgaaaatgtagaatgggtatcaagtatgtggaagcttgaatatcttcatttgagtaaagcaaacctatccaaagcatttcattggctacacactctccaatctcttccttctttgacccacctatatttgtcagactgcacactccctcactataatgaaccatccttgctcaacttctcatctctgcaaactctccatctttaccgtactagttattcccctgccatttcttttgtccccaagtggatattcaaattgaagaaacttgtttctcttcaattacagagtaatgaaattcaaggttcgattcctggtggtattcgaaacctcacacttcttcaaaatcttgacttgtctggaaattcattctcatcttctatacctgattgcttatacggtcttcatcgtctcatgtatctggacctaagttacaacaacttgcttgggactatttctgatgccctgggaaatttgacttctcttgttgaacttgatttatcacggaatcaacttgaaggaactattccaacttctttgggaaatttgacttctcttgttgaactttatttatcaaataatcaacttgaaggaaccattccaccttctttaggaaatttgacttctctgattagacttgatttgtcatatagtcaacttgaaggaaacattccaacttctttgggaaatttgacttctcttgttgaacttgatttatcatatagtcaacttgaaggaaacattccaacttctttgggtaatgtctgcaacttaagggtgatacgtttatcatatctcaaactcaaccaacaggttaatgaacttttagaaattcttgctccttgtatttcccatggactcacaagacttgcagttcagagttcacaactttcaggcaatctgacagatcatattggggcatttgaaaatattgtgctgctagatttttccaacaactcaattggtggtgctcttcctagatcatttggaaaactttcatcattaagatttctcaatctgtctattaataaattcagtggaaatccatttgaaagtcttggatcactctctaaattgtcatctctttatattgatggcaatctttttcatggagttgtcaaggaagatgatcttgcaaatcttacaagcttgacggagtttggagcatcagggaacaatttcactttaaaagtgggtcccaattggcgtcctaattttcggctttcctatttggatgtgacatcatggcagttaagtcccaactttccatcgtggattcagtcacaaaacaaacttcaatatgttggactgtctaacacggggattttagattctattcccacctggttctgggaaacaccttctcagattttgtatttaaacctctcttataatcatatccatggtgagattgagactacattaaagaatccaatatctatccaaactattgatctaagctcaaatcacttgtgtggtaaattaccctatctttcaagtgatgtgtttcagttagatctttcaagcaattcattctctgaatccatgaatgactttttatgtaagcatcaggacgggccagtgcaattagaatttctgaatcttgcatcaaataatttgtcaggagagatacctgattgctggatgaattggacatctcttgtgtatgtaaatttacaaagcaaccattttgttgggaacttaccccaatccatgggttccttggcagacctgcagtcgttacaaattcgtaacaacacactctcaggaatatttccaaccagtttgaagaagaataaccaattgatatccttggaccttggggaaaataatctttcaggaagtattccaacatgggttggagaaaagctcttaaatgtgaaaatcctcctccttcgatcaaacagttttaccggccacattccaaatgaaatatgtcagatgagtcttcttcaggttttagaccttgcacaaaacaatttgtctggcaatataccgagctgtttcagtaacttgagtgccatgacactaaagaaccaaagtacagatcctcatatctattctcaagcacaacttgttatgctttacacttcctggtatagcatagttagtgtgctactatggctgaaaggaagaggagatgagtatagaaacattctgggtttggtaacaagcattgatctatcaagtaacaaattattaggagaaatacctaaaaaaatcacaaatctaaatggattgaactttttgaacttgtcccacaaccaattgattggtcatattccacaaggcattggtaatatgggatcattacaatccattgatttttctaggaatcaactttctggtgaaatccctccaaccatttcaaatttgagctttttgagcatgctagacgtgtcttataatcatttgaagggaaaaattccaacaggaactcaattgcaaacctttgatgcctccagctttattggcaacaatctatgtggcccaccactgcccataaactgctggtccaatgggaaaactcatagttatgaaggaagtgatgggcatggagtgaattggttttttgttggtgcgacaattggatttgttgtgggattctggatagtgattgctcctttactgatttgtagatcatggaggtatgcctattttcatttccttgatcatgtgtggttcaaacttcaatctttttactcatgtagtatcagtgtttagtgttgcttagaatacaccgatgttgtatcattgtattggcaggttgatcaatttatgtcaacaaataaatttaaacaaactaatccattatatttcaattttcagtaatgttgttatatttaatggataagagttgtaccttgggaattgttgtcattgcatctacatacacaagtgtatctatttttttttttaagttatgtttctttgaaatttattcatatgtttgaatctctcttgaaatgagatttcaaatattcccttgttgttgggtaatgaaatccaaggtcgatccgattccctggtggtattcgaaacctcacacttctttaaaatcttgacttgtctcaaaattcattctcatattctatacttgattggttatacggtcttcatcgtctcaagtatttggacctaaggtacagcaatttgcataggactatttatgatgtctggggaaatttgacttctcttgttgaacttgatttatcaattaatcaatctgaagcaaccattcgaacttcttgggggtaatctctgcaacttgggggagattgatttcttatatctcaaactcaaccaacaggttaatgatattttagaaattctagctctttgtatttcccatggactcacaactttcagtcaatttgacggcttattaacattcaggggtatttttcaaattattttccaaaaaacaataagtcatatcaggtattatgatatattagttggaaatcgtagactttttttggtattatgatatatgagttggaagtcgtaacttgactttttttctaatgaaagtgataaaattatttatgagtttaatgtaattttttttatatgggacttcaaagtcgtaaattttttttttaattttactattcaaagtcgtaagtcttttttaaaatttttttaacttaagacttcaaaactgtaagtttaattttttttttctttttatgacttttgaaattgtgtttcttttttttttacgtttaatttttttaactttagaattttttacttacttgtattttatttttttgtttctaatttttttcaaaaattataaaaaaattaattatttaataattaagtaaatattttatttattcatttaacaaataaaattctataacattatttaaaaattatctaaattatctaaatttcatttaacaaataataattaagtaattattttatctaaattgaattttcaaagcaaccatttttttgggaacttaccctcatccatgggaatgactacagagatagaaatgaggacgaattttactgtctttgttctgcataattaagttttttcgtattatttagttttttcacaatcttttgtttccttctcttcctgatgttattttagactcttctcaatcatcaaactgacagcctagacttgtttatttcagctttggtggaagttaatttataatgtaatgaattgttatatcactttgtgggataatttgcatgtgtgaaatgtactatcttactctatcccactcaaatatctttattgtttttcctattattgacttcatcacgagccaagagttgtagtaattgtttctccaactaatggaattaatccgagaagacccacaaacccaacttgaacattttgttaggtcacagggtcagagaaagcaaggcatgctaaaatcaagtttgagggaccaatggacttggaagaagatcctcatgcccacaaagtacatatcaagtgtatatgctccagccaattatcaagcagtggatcatatgattgacgctcaagtaaattgaacaaactaaagctgcagaaatcaattttcaatgatctgtcattgcttacttaagctatggataattacttgatttatgtctcattacacaattttggaagatcagctggtaaaaatgtataataaaatttattgtggcttaaaataatgcggtgtttgattttgtgaggtccttaagtggcatagatatggtgtgatccacaagttccgtaacaatccaaaatagaaggttgaattgctctaggaatcctatcatcttacaagatttaacattttcaatctgtgatttttttttttgacatgggtgtcaatcatagtatatggtggttaacaagttgcatttagcaagaatttattgagttgcttctaatcaattctcatgccattttattaatgccttatggctaacagttggggcaaaaattgacattaccccattgagaaatatatctctaggatgatgactgtccacaattatccaaaacacttcagtgcaacaaaaactcaatatccatctgctggaagaaacgatcagtttctaactcgatcaatcatagtatatgggagttcgcagcctattttccacaatgtcagaatctcctattcggcgcatgttcaaagtcgattaaaacaaatgcccttggcatatttgaccacaaatgaagaatagttgcagaaatttggaaatggaatcttaaggttcgggttaagggtttctaaaatataggtatttaatttgtgatacaaatgtcatattatatcgtatgagaggcaacacaaggccacataatcaggaaagttaactatttaagctaacataaaacttggtgagaacccatggattgcaaacaagcagggaggtatcaagtgagtttttttttttttcacatgaatgaaaaataaatattaaacattagatttgatcatgaactgtcaaattaaaatctaggacaagtgtaaaattacttacatacactaatgggatctagtttaattggttgaacaagtggatttattattgtaaaactctctagtaattatctttgatttctatgaataaaaaacttacataaatttatttttattatccatttaattttaaacttccattcaatcaatatcaacctggataaattcataaaaggtatagattttgttattatcaagggtatatgtattagaaggaaggagtaaagttttttggggtaaatctcttatgggtaatattttcattgatcaaataacatttgcgcttttctatatataggttttccgaataagagggtttagtggtaattaatattcaaatcaatagattttatgacagtctaatgactttgaaattgatcccttggtgcttgaatctctcttgaaatgagatttcatgggagacaattttagcaaatgactataaaggaaaacaatttatttaataattaaataaatactagttaacaatttttttaaaaaggaaaacaaaataaaaaaataaaatacaagaaaataaaaaattctaaaattaaaaaatgactataaagtcgtaaaaggaaaaataaagtaaaaaaataaaacttatcactttaaaatcgtaatagaaaaaacttataactttgaagtcgtaaaattaaaaaaatatatctaaatgactttgaagtaataaaaaaaggagacataaataattttacgatttaagttaaaaaaaaatattaagtcataatagatgttagacttataacttaaatgttataataccacttattcacttttggagcataatttgaaaagtacccacatgagaaaaaaaacacaaaaaatttatccctagatgataaaataacccaatttgacggattaaattggagtttttaaaaatgttgacatgctagatttttacaacaactcaattggtggtgccctttctagatcatttggaaaactttcaacattaagatatcttgatctgtctattgataaattcagtggaaattgatttgaaagtctttgatcactctctaaattgtcatctcatgaatatctctaaattgtcatctcttcatattgatggcaatcttttcaaagagttgtcaaggaaaatgatcttagaaatcttacaagcttgaaggagtttcatgcatcagggaacaatttcactttaaaagtgggtcccaattggcttcctaattttcagcttacctctttggatgtgagatcctggcagtaaggtgccaattttccatcatggattcagtcacaaaacaaacttcaagatgttggactgtctaacacggggattttagattctattcccatacggatgtgagaagcactttctcaggttttgtatttaaacctctctcacaatcatatccatggtgagcttgggactacattaaagaatccattatctatccatactattgatctaagctcaaatcacttatgtggtaaattatcctatctttcaagtgatgtgtttcggttagatctttcaagcaattcattctctgaatccatgaaattagaatttctgaatcttgcatcaaataatttgtcaggagaaataccaaattgttggatgatttggccatttctagtggaagtgaatttacaaagcaaccattctgttgggaacttaccctcatccatgggaatgactacagagatagaaatgaggacgaattttactgtctttgttctgcataatgaagttttttcgtattatttagttttttcaccattttttgtttccttatcttcctgatgctattttagactcttctcaatcatcaaactgacagcctagacttgtttatttcagctttggtggaagttaatttttaatgtaatgaattattatatcactttgtgggataatgtactgtcttactctatcccactcaatatctttattgttttttctattattgatttcatcacgagtcaagagttgtagtaattgttttttttttcacatgaatgaaaaataaatattaaccattagatttgatcatgaactgtcaaattaaaatctaggacaagtgtaaaattacttacatacactaatgggatctagtttaattggttgaacaagtggatttgttattgtaaaactctagtaattatctttgatttttatgaataaaaaacttacataaacttatttttattatccatttaattttaaacttccattcaatcaatatcaacctggataaattcataaaaggtatagattttgttattatcaagggtatatgtattagaaggaaggagtaaagttttttggggtaaatctcttatgggtaatattttcattgatcaaataacattttggcttttctatatataggttttccgaataagagggtttagtgataattaatattcaaatcaatagattttatgacagtctaatgactttgaaattgatcccttggtgcttgaatctctcttgaaatgagatttcaaatattcacttattactgggtattacatccatttcaatccaattatgagtgcatatcagaataggctgcctttggagcaaatttgtttccaacaatgacgaaggtgattgtagagattggtaggaggaggttggggtttccgtgtgctatgtcctacgataaatctgtaggcataaaagaatccaacggatataaaaaaaaaatcattcacagtggatcacttatgaaagtggttcaccttagacgtcgtctcttttacaaagtgatctttaaaaattaaattttaatttgtattcatctttgggtgttgaatgtacgttccttctttcacagtgatctttaaacaatttgatatgttataaacatttgctgtttttttctgtcaatcactacagacttagtattggaattaaagaatttggatgtgaaaggaagaaaactacaacgtgaaagttgttacacagaaaaaagaaagtttaaaaagcacaaaccccgcgtgagcctcactaattaaagttaaagttggacaaaataaaagtacataatataagtgtacagccaatggaacaattccatctcagattgggaatctcgacaatttgctctatcttcgccttggaggtaattatctgtttgctgaaaatgtagaatgggtatcaagtatgtggaagcttgaatatctttatttgagttatgcaaacctatccaaagcatttcattggctacacactctccaatctcttccttctttgacccacctatatttgtcatactgcacactccctcactataatgaaccatccttgctcaacttctcatctctacaaactctccatctttccttcactagttattcctcggccatttcttttgtccccaagtggatattcaaattgaagaaacttgtttctcttcaattacagggtaatgaaattcaaggtccgattcctggtggtattcgaaacctcacacttcttcaaaatcttgacttgtctggaaattcattttcatcttttatacctaattgcttatgcggtcttcatcgtctcaagttcctgaacctaatggacaacaacttacatgggactatttctgatgccctgcgaaatttgacttctcttgttgaactttatttgtcatataatcaacttgaaggaacaattccgacttttttgggaaatctccgcaactcaagggagatagatttaacatttctcgatctctctattaataaattcagtggaaatccatttgaaagtcttggatcactctctaaattgtcagttcttcatattgatggcaataattttcaaggagttgtcaacgaagatgatcttgcaaatcttacaagcttgaaggagtttattgcatcagggaacaatttcactttaaaagtgggtcctaattggattcctaattttcaacttacctatttggatgtgacatcatggcagataggtcccaactttccatcgtggattcaatcacaaaacaaacttcaatatattggactgtctaacacggggattttagattctattcccacttggttctgggaaccacactctcaggttttgcatttaaacctctctcataatcatatccatggtgagcttgtgactacattacaaaatccaatatctatccaaactgttgatctaagcacaaatcacttatgtggtaaattaccctatctttcaaatgatgtgtatgagttagacctttcaaccaattcattctctgaatccatgcaagaatttttatgtaacaatcaggacaaggcaatgcaattagaatttctcaatcttgcatcaaataatctgtcaggagaaattccttaatattggattgattggccatttctagtggaagtgaatttacaaagcaaccattttgttgggaacttccccccatccatgggttccttggctgagctgcagtcattagaaattcgtaacaacttgctctcaggaatatttcctaccagtttgaagaagactggccaattgatatccttggatcttggagaaaataatctttcaggatgtattccaacatgggttggagaaaaactctcaaatatgaaaatcctctgccttcggtcaaacagttttcccggtcacattccaaatgaaatatgtcagatgagtcttcttcaggttttagaccttgcaaaaaatagtttgtctggcaatatacccagctgtttccgtaacttgagtgccatgacactagtgaaccggagtccatatccccaaatctattctcatgcaccaaataatacagaatactcttcggtatcaggtatagttagtgtgctactatggctaaaaggaagaggagatgagtatggaaacattctgggtttggtaacaagtattgatctgtcaagtaacaaattattaggagaaattcctagagaaatcacagatctaaatggattgtactttttgaacttgtcccacaaccaattgattggtcctattccagaaggtattggtaatatgggatcgttacaaaccattgatttttcgaggaatcaactttctgatgaaatccctccaaccatttctaatttgagctttttgagcatgttagacgtgtcttataatcatttgaagggaaaaattccaacaggaactcaattgcaaacctttgatgccttcagatttattggcaacaatctatgtggtccatcactgcccataaactgcagctccaatgggaaaactcatagttatgaaggaagtcatgggcatggagtgaattggttttttgttagtgccacaattggatttgttgtgggactttggatagtgattgctcctttgctgatttgtagatcatggcggcatgcctattttcatttccttgatcatgtgtggttcaaacttcaatctttttcctcgtatagtatcactgtttagtgttgcttacaatcgatgttgtatcattgtattgccaggttgttcaatttgcattgtagtcattgctatcttctttcttttttcttttttttttcttcaaatttgagagtcttatttaaattctgttttgcgatgtacatatttgcatattgagcatatttgtagttaagatcaaatagttgtaattctgtgtatcgcattcttgtttccaaaaatgagggactagtggttcaagaaaacgtggtttaataggaaaaaaacttatatttaattttagtcgctaaccattgaagtgaataattagttctttcgtgttaattaaagtcgtgactcgtggctgcatacaagacttgactcttcaagccggccaggccaagaactttgatgagatatccatagataaccaatgatgcttgagaaccaacaaaattgttggagtaatattctaaattaccctaactataaaaagggaaaataataggtgaaactttttaagtattattcgttttgctttttcaagttttactttatataataataaaagtcagcttttaaaattaattatcaaattgaaatgttaactttacttaaaaattaacacaaaaaatactaaagaatttatctttatgaaaaaaaaattttgaagagtcaaaatgaattaatattcaagtgttccaggatcagtattaattacaaccaaaactaacggaatatgaagcctgaaacagaaaagtgataacaaaatcacaggaagtatcttggctaattttttatttgataaatatataaatttttggaattcatttttgtaaaaatttaataaattttttatctttacaaaattaaaatacattattattatttggtctgaatgtagattcagataaatttaaattatgagtttttatattgattatacatatatataattgatgtaattaattatacatataaccaaaaatgtaataaataatttggaatgtttaaatcttacttcaagaaaaaaataatatattttaattttatgagaactaaaaatatattaaaattttattcagataaattttcaatattttaatatttataagattaaaaatatattttaaccttataaaaatatcaacaaataaacaaaatgtcttttgtttaacagttttaagaattaaataattgatagtaatcataattttaaaaaattaactaacgtattatacaaaatgttgagctaaagatcaattaagggtatttttgaatgatcatggcccaagcattctttgacaaggtcagctaccgatatcgcatcaacatttactcacttcttccattaaaaggaactgcaggctgaaagtcgtaatcttcatttttatactttttagattatacaaagttggaaatattaaaacattatgtggtgggcgaattagtgaacaaaaattataagatctgcacagcttattctaatttaattctaatttagaaattaattattttccattttactccctttatgacaaatttaatttttatttataagccggtctctcataaaccttgtaccatattttaaagcaaaccgtaacacatcataaaacttagtgatataattttagatgtctttgtgtgtcagagatgtattgttaatatttatagcatccttcctcataaaatttagggatataaaataatttgatttgccttttatgtgtgtgtgcgtgatgtaacgttaatgtttacgaccaagctaaaagtacaaaaaaataatttttatctaaagtttttcttgtaataaatataatgggtgaaattagccataatcaaattctacttttttttaatttcctttttatatacagtgccatatataacaggaaactgaatttgtccgtgttcaaactagactaacagcgccaagaatgagaatgaacataattttcaacaactttgatctgtagactctaggttagtattaaaaacataaaacaaaatattattgtaaacataaagatgaaaattattgagtctaaccttttttatgaaaaggggagagtataagggaggaaaggaagaaccaatagaaaaatcaattttgattcaaaatgtccttgcccctgtagctcaatggtggagactatgggggcatccaatattattaattttttttcacttgatcatgaaaaatgaataaagtaccaactgattagattttttttttccaacttaattttagagcatagtaaataatttttttttagaatgtaagttgataaaattatatatgatagaaatatgacactactcatacaacaattcatataattcagacaacttcaatttatttatctatttctaaccatcatatcatttattatactttaaatttatctttccttttgttgtaaataacatttatgttgtattttaaatttttaattaaattaaaaatatccagcataatgtaaaagatatttgttaattttttccaaaaggaaaaattaatatatatatatatatatatatatatttatatttatattatacaatagtagcttgaccaaaaggatcagtagaaataattaaattttgtcgagtataagaaacgtagcttcactgtccattattattagccaaatgttaactggtgaggacattgattaaaaaagtaaaaagaaaataattttcattgaagtgtataaaattatgttatttatgatttttttaaaaattttattgttcactatatttttcatttgaatttcttaattaatgctataagagtagttgttagtaagattcgtattcttataagaaaaataatgctgtgttatgatataaaaacatcatacgtaattttcagcatgagatagtgataggatatcagcagcagataacagggataaggaaccagaagcaagcatcagaaagacagaaacattgaagggagtagcagtaattaacaaaccagaggtgcaaaaagaagaaaagactaagagaaaggtcacaaagccatcttaccttcgtgattacgtatgaagcaaaaaggggcaaattggacaatatagcagcagtgggcaatttagcagtagaggtctagcttgggtcatgtttgtcttatcctctccgacaagcataacaaactttgatacgtgtaatattccttgagcaaattgatacaattctgttaggaagattgttatatatatctatgtaaataacaagctatgacatgaataaaaattgcccttttcttaccttgttcttcctttattctccctaattctctggagatagtttctgtatgaggacccagtataggagcaatctttttgttttctttcaaacataaagtatcgcaggtagtttggagcaacaggttctccattgactagtagtagtagctatagtgaccaaacttaattcctcattatcatagccatcatacaaacctagctcacactgtcaaataattaaaattttgaaaaaaaaaagaaaaaggatatataataaacaaaatcaataattcacaatacacaaattaaccttttagcatgtgattattatatcaaaacctttttttttgggtacctttcaatttgtcattcaagtctagaaggacctatgtgtggacatctaaaggagtccatttatgagtgaaaattttcaaaatttgtttatcgtatcgtagcaggctaagtaggattttatattgctattcacattacccatgtgggtagaaaattagaaaattctagaagtattctttttacataaatatgattttgttatacaaatatacaatagaattatatttttattacattgtttgggacacaattctagaagtagttttttttgttcagtttcaaaatcattaaaaattaaactcagtttatgttttgagtttttagtttcagtttattttaatttttagatttttaaaaattatttaatagataaaataatttaaatatttaatcttatcacactccattataaaatcatgtaatattaaaaaaatgttgacacaaaaataaataaaaaagaattaaacataataaaaataattaaaaaataaacagtaaaggttaaaacataaacaataatcagtaaattgtttgttaaatgtgacaaaaaccatttcagaaagatgtaaaaaatcaacttagtgcaatttttgttgaacatgtttgtatttcgaaattatattttaaaacggaaaattgaaaattgacaatcacccaccttaatttttaaataagtaaaaagtattgtatgtgtggtgcacagggcagagattaatataaaggcatggcatattttgttgggagagttgaaagaaggcactacgaggataccatggctgaacagagagccttatgcttactggaaaggtaatccagctgttgctgaaaccagacaagacctcatgaaatgcaatgtttctgaaaatcaagattggaatgctcgtttatttgcccaggtatcacacttcttattagctttgtttgattacacttgttgaaagtagtttcattatttggatatgaaaaaattaattttctatgtaatatttctcataagcaaaagtttcattatataaaattggcttaagcacatggtgtgcagaaactagaaataacaggcaaattcaagcaacacaatggccagcagcaatattgtatataacattatacaattttttaacttttaatcttttattaatacacaacttaaaagtacattcaaaatcaaaggaaataacctgttattgaacattactgattttttccttctgaacaatatattttgtctgttaattgactcacaataaagccacatatatagcttccttcttgacaaatgaaaattttgtttcaggattggtttcgagaatcacaagaggggttcagcaaatcagacttgccaagtcaatgcacttataggtataacattaaaactgtccattcatgcttcagttgtaattatatgtaaaatatatttttgttattggatatatatgttcagtttatcaataaataaatgtttcaattcaatcatgatcgtgcagatataaggtgtacattgaaggttctgcttggtcagtcagtcaaaaatacattctgtcatgtgactctaccactctacgtgtacgactacatgtttcatctcctgaattcatatgctaaactcttcagatacaaaccctccataagtgctaatgctacagaactatgtgtggagtcaatggtttgtggagcagaaggatcagtaaagaaatttatgatggaatcattggtcaaggttcctgcaaataccgacccttgcaccatgcctgccccttttgaccctccaactttgtatgcaacattacagagaaaggaaagctcaattcaacaagttgaatcatgggagaaaagttgttgggataatcaaaccataacatcttaatgaatatttgtttttccatgttcaacttaactcattcattcttagaatatcttgggaggatacaagtacaacaacaacaacaacgccttatcccattaggtggggtcggctacatggatcaacttctgccataatgttctatcaagtaccatacttctatccaaatcattaagttcgagatcctttttgataacctctcttatagtctttttggtcttcctctgcctcgaattgtttgccttcgctccatctgatctactctcctcactacagagtctaccggtcttctctctacatgcccaaaccacctaagtctattttccaccatcttctctacaataggcgctactccaaccctctctctaatagcttcgtttctaattttatcctgtcgagtcttaccacacatccaccgcaacatccaccgcaacatcctcatctccgctacacctactttattctcatgttggctcttgaccgcccaacattctgttccgtacaaaatcgccggtcttaccgcagtccgataaaactttccctttagcttgatcggtacctttgcatcacataacacccccgatgcttttctccatttcatccatcctgcttgaatgcgatgattcacatccccttcaatttctccatcatcctgtattacggatccaagatatttaaaccgtgtgacttgagggataatatggtctcctattttcacctctgagttagaaaccctccttcttttgttgaacttacattccatatactccgatttgcttctgcttaggcgaaaaccatgtgtttctagagctcgtctccaagtttccaacctctcattcaactcctccctcgactctccaaggaggactatgtcatctgcaaaaagcatgcatctcggcgctatctcttggatttgttccgtgaggacatccagaattaaggtaaaaaggtaggggctaagggttgacccttgatgcaaaccaattgtgatgggaaaatcgtctgactctccaccctgtgtcctaacactagtcgataccctatcatacatatcttggatagctcaaatatatgcaaccctaatccctttcttctctagagctttccacaaaatctctctaggcactctatcatacgctttctccaagtcaataaaaatcaagtgcaagtcttgttggtccatgcgatattgctccatcacccgccgtaataaataaatcgcttccatggtcgaccttcccggcatgaaaccaaattgattctcagtaacttgagtctcctttcttaatctccgttcgatcactctttcccataatttcatggtatgactcatgagcttgattcccctataatttgcacaattttgtatatcccccttgttcttatagattggcactaacgtgcttctcctccattcctccggcatgcgttttgacctcataattttattaaagagtttggtgagccactcaaggcctctatctccaagagttttccacacttcaatagatatgttgtctggccccaccgccttaccgttactcattcttttcaacgcttcctttacttcctgtttctgaatccgacgatagtacttatagttccggtcctcttctcttgtgtctagactgctagagtcatatccatatccatcattagataagttgtggaaatacgccttccacctttccttgatatctttttcatgcactaagactttgccttcttcatccttaacacactttacttgatccaaatctctagtagaatctagattatcttgtacttggctaaagaaaccatatcatgcttgacgaattatcagttttagactttacgaggaaaaaaaaattagtttgttaattttgtaaatatggataccaaaatgtaaaatttgatatcaattaagttaactaatgaatcaaatttgtaaaatttgaaaatatggaaacgaacccagcaattgaaaagtgggataccaaaatcatcctcaagtgtacttaaaaaaaaataaaagattttaatttctattacaacaagtcgttatttcttattagagataaaagaattttaggactgaacaataagatttgtgtaacaagcatttagttgtatgagattaaaggcaaaatgctgacaaaaataaatctccaataaggttttgcaataatgtctattgtgagtctgtcagagatttaatacactcgagtgtaaatatttttacactatcaactaatcaatggtttacatttcaacgtgatatgaaaatggtaatatataggtagtatttgagttaagctcatgaaagccaaattagaagccctgcaactgcaaccaaactttctaacaatctcttcccgatataagacgcactattcttcttaggaaatggaaacataacactgtagtgtagtgttctttaagaaataggaaggcttaattagaaattgaacgtaccagaacactgagagattatcaggtgttttgcaaagagaagggagaccaacagcaattgtcatgttaatctttaagccaaggtcaggatcatccctgtctttgagaataaggcagacacacttcttgttggtcttcatggcttgtgtgagaccactgcaacaatctaccgaatatttaaccgatacattattatttaactaatgatagagatttaaagcaaaagatttcaaatattagagattttcgttgaagaaaaaaattgtcaaaagatcaaataaaaagtcgaatataaatcatggattaaaaacataattttattttcttaaaaaaaagtacattttcctattccaaaagtgttaaattctctcatgttattatacccctagtagttatttgtttctgaccgagtctctttagtgtccaatttgctgatgtgaagggtagaaagacccaatgacaatgttgtcatcaaatttgaaaagaaataactatacaaaatatataaaaaaaacataacactaatagaccaaaacactatcaaacactaaatgaaattaaatatgtttttatccttaataaatagttaatttttttaaataattttttttatattgaatttctaataaattaatatttttattttttatctttgattttttattttagtctatgataaattaaaaaaaattgtttactttctagtaaattttattttaatatgtattaataataaatgaaaaatatttataatgaagcaaaaaaaaataatttattaaggactaaaaataagtgtttaatataaaaaataaaattatcattttattaaaaatttatcaaatatatatatatatatatatatatatatatatatatatatatatatatatatatatatatatataatcagatatttattaaaaataaaaaatatatttaagccccttaaataattaagcagtacatgtgtgggatagtagacttccttcttgtgaacaggacctgatcctgagtgtatttttcatatttgtccaagcaaaaaaaccaaataaagtgaaacaatgtttgacttcctatcttcaaagttaaaagttaagtctctggagaagatggcttcgataaagacacaataaaactgcttctggagaagagggaatttcaaggcatttgttcttccctaaaagcaacttaactctaatgaaaatgttaacactgaacaagaggctatagtcgaaaaccaactaacattccaaaattcctcactaaccatccctattatatttgacaaccacacccgtgatgaaaattatagtgcggtctcattccactgtctcaataaataaaaaatatacaaaaaatcacaataaggatatgttaattaagaatttaatttaaatacacttagaattgcaattaactatatatattctcctataacttttttttagtaattgttttacaaatcattaggtgatatctaattaattaacaatttaaatttttacactgtctatctaaattaaactcatgtattaacatcatcaaagttattttcgttttagttttgatagttttttttctaattaagtactactagtagttgccattctcattattttattatacgtacattctaattaacttgagataccattaagataaaagtggtgtgaaaaaaagagcatcaaagtaggcgtacgtatggcgtcaagagtttcatcacttgttctgtgagggaaacaaaaaacattataagttcaaaattcaaagcaaaagaattccttttgtaaaacacatcatttgtttctcaattctcctaagaaaaaaaccacttgcactaatgggttggtacaagggtccttgtggcagccatcatgcacaacaatgcaaattccctgacttggtaaaaaaggctaggaaggaattcgtaataaccactgaatcaaagtcttctgtaacatttggaaatatgtgagtgaaattttcaaaacaccaaacagttatagtatcaaatttggtttctttccgttaggcccatattacgcaccatgtccaaagagtgctagacgtgaggggtgaattaaaaaaaaaaaaatctaagtctcacattagttagagatagtctcaagatagagtttataaggtgagggcaaccctaatcctatgagctagcttttagggttgagttagacccagatttcttctctttctacccaaatagagttgcaaaaacggaagactaagagcttaattagatagaattcaaagttgtaaattccaaacctgtttttacaaaaaaaataaaaggtttaattatccttttgacccttaaagttacgacaatatttctttttaattcttatagtttaaattattctattttagtcccggttgaattttttttttgactctttgattctcaccatcaagtttcgactaaagtcaattgttgaaactaatgttatggagagggcaaagacactctcctatgcacacacgagacatggctgatcatcttttctctcaacaacaaaccggcacctgcaacatcatcccaaccatgaaggcacaaactaccacacatctgttactcatggaaccagaaactcacaatcacacactttatctgcagcaatcaaaaccatcatcccattggaacgatcaacttagttcaatgctgtgataccactccaacttgatgagacacagtaaagaaggagattacatcatggcaattggcaaatgctaagctttcagaggtcggtggcagacacaagaataatggaatgtgtagtgcctttgtctcatacctccattacacttcagttgtacctgagcgtgcttccctatttttattaattttgttcatgtttatgtgtgacttgaatcttccccgcgaggacaaaaaggtaaaaaaaatgtaaatataggaaccaaaatgaatgtcttaaattatagggactaaaaaaaattatcacaactataaggactaaaagagtaattaaatcaaaataaaataaactagtgcaaaataatggtggtgtggttagacacttttaatcctaaatgtctcgttgttgacatatatacctctacatatgtgtgcattttgcaaccaccaccattagtggagtaaaattttaaatgctaacccttctacggtatatatcctacataggcattgttagtagtaaataccaaccgtgaaccagaaaattgtggattcaactttcgtcttccttcttcttcatggcagtgctatttgcaactcatgttcttctcttgatattgtccacttcaacaactctccacttcagtgcaagcaaggcagcaaggctcaatatgacttgcagcgagaaggaaaggaatgcactcctcagcttcaagcatggactagcagacccttcaaacaggctttcatcatggtctgacaaatcggattgctgtacatggccaggggttcactgcaacaacacaggtaaagtcatggaaatcaatcttgacacacctgcgggctctccctatagggagttgagcggagagattagtccttctttgcttgaactaaaatatttgaatcgtttggacttgagttcaaattattttgttcttactccaataccaagcttcctaggctcattggagagtctgagatacttggaccttagcttaagtgggttcatgggattaatccctcatcaactaggaaacctctaaaacctgcagcaccttaatcttggatacaattatgctcttcagatagataaccttaattggatatcaaggctatcttccttcgagtaccttgatttgagtggttcagaccttcataaacaaggtaactggcttcaagtactgagtgcacttccatctctttcagaactacacttggagagctgtcaaattgataacgtaggaccaccaaaaggaaaaaccaacttcacacatctccaagtccttgatctttcaattaacaatctcaatcagcaaatcccttcatggctatttaatctcagcacaactcttgtccaacttgatttacacagtaaccttttacagggagaaattccacaaataatatctagccttcagaacatgaaaaatctagacctgcagaacaaccagctcagtgggccacttccagattcattaggccagcttaagcatcttgaagttctaaatctcagtaataatacctttacttgtccaattccctcaccatttgcaaacttgtcatccttgagaactttaaacctggctcacaaccgactgaatggaaccattcctaagagttttgagttcctcagaaacctgcaggtattaaatcttggaactaattctttgactggtgatatgcctgtaactcttggaactctctcaaatttagtgatgttagacctttcatctaatttgttagaaggatctataaaagagtcaaattttgtaaaacttttgaaactaaaggaactacgtttgtcttggacaaacttgttcctcagtgtcaactctggatgggttcctccttttcagcttgaatatgttttactgagctcctttggaataggtcctaagtttccagaatggctaaaaaggcaaagttctgtgaaggttttgacaatgtcgaaggcaggtatcgcagacttggttccaagttggttttggaattggactttgcaaattgaattcctggatctgtcaaacaatctgttaagtggagacctatctaacatctttctcaattccagcgtcataaatttgagttctaatttgttcaagggtacattgccaagtgtgtctgcaaatgttgaagtgctgaatgttgccaataactcaatttccggaacaatttctccctttttatgtggaaaggaaaatgctactaataagttaagtgtgcttgatttttcaaataatgtcttatatggtgatcttggtcactgttgggtgcattggcaagcattggtgcatttgaacttgggtagtaataatttgtctggtgttattccaaactccatggggtatctatctcaacactgcaaaattgctctacaatgaaattcattgacatgggcaataaccaactttctgacgcaataccagattggatgtgggaaatgcaatatctaatggttcttcgtctaagatccaacaatttcaatggcagcattactcaagagatttgtcaactttcttcccttatagtgctggatcttggcaataacagcctgtcaggatccattccaaatagtttggatgacatgaagacaatggctggtgaagatgacttctttgccaaccctttaagttattcatatggctctgacttcagttataaccactacaaggaaactcttgtcttagttcccaaaggagaagagttagagtacagagacaatctgatattggtgagaatgattgatctttcaagtaataagctgtctggagcaattccatctgaaatttccaagctatctgctttgcggtttttgaacttgtctagaaatcatctgtctggagggataccaaatgacatgggaaaaatgaaattgttagaatcccttgatctctaactaaacaacatttcaggtcaaatccctcaaagcttatctgatttgtccttcctcagtttcctgaatctatcatgccacaacttatcaggcagaattcccacgagcacccaacttcaaagctttgaagaacttagctacactggaaatcctgagctttgtggtccccctgtaacaaaaaattgcacaaacaaggaatggttgagggagagtgcttctgttggacaaggtgatggtaatttctttggaacatcagagttttatattggtatgggagttggatttgcagcaggattttggggtttttgcagtgttgttttcttcaacagaacttggaggcgtgcttattttcattatcttgaccacttgagatatctgatttatgtgatgatagttttgaaggtaagaaggttacttgggaaattatgagtttacatgttaactgttaggagtgagagacattacaacgtgttagtctagccattaaaaatgagaaaaggtttaccatactatgtatctgttcatctgtggtgttctgtctgttttgctttcattggtattaaatgttcttaatgttaagagaagtagacgagcttgagacttagtatcaaattctgttttgtatttatgacgcattattgtcttctactatctgtgcactaacaatgattagcattaaaatacctgaaatgacacactcggtgattggatttaagaagattgttttacataacatgtaactaagaatttgcctgaatgaatttaattagtgtagaaagttggagcttgcataggattttgcagtttctaagctcttccacatcttccttctctcgcttttccttattctgatacattccacattcccatttcctgagtattgatgcatttattctataatactcattaacaagttcatttgacaaatcatgattgattaaattttaaaaatcatgaaatattacttttttattcataaaagttcctatcgttttatacaagggtcactagttgtattgaattccctcatacaaaataaagtttcaagctatcagatatagggtttccatcacacctgtatcacctatagggttttccatctgttcattttcttccactggccgatgtctagttcttcatccaccctatctattttcacatcggtttctctcactgtttcagttccgagatcataaatgtagggaaaaaaaatagaaaaaaagaatagcatatacactatatatgcatgtacaaaaaaaaaaatacaaaacacttgtcaagtccttttgctcctcagacaatgaagacagatttagaatgctctcataatttatatttagtttaatttcacttttgatctccatgcattacgtaaattaggtattataattttgtaagtttaatttggtcccttagatgtggcttattcacttctgcttccttataactgcaatattctaagggatcaaaagtttagttcagtatgtgttaggcaacatggtagttgtcatattatctacttttcatctagtgtcatgccagtaaatatctgttaaatattcaaagtaagatggaaggagggattgaaattgcaatgcctagtggatccaatccaattctcccaattggaacttacaatagaccaaaatcgcacaattactgtacctgaagaataaagaatgcaattaaaattttatattttttatctttaattttaatttcataaaaaaaatcttttcaaactcaaattcagtcaattataatagaaccatacaatagtttttttttttcagggaaaccacacaatagttttaaaaacatttatatgcagttttttaattaaaagtcaaatcagaattcaattaatgcattggaatcaatgtattaattgctttcattctactaaaaacaccaatcttttttaaaaaatttattaacataaaaaatataatacaattattgaattacaatagtgacaattacacttgtgttttattgaattgtttggttatgtttttaatcactagatggacctagtgacaagggagtttgactaattcgcacaagggagttaaatatttcaataaattgtatatttatttttctcttctatcactattcttaaactatcaccacataagtaaatgaaatttagacaaaagctttaatatatgaagacttgtggtctaacaataaatagctaggaccataattttataatttaaaaaacatgccacacttcttaatttgtagatcttctaatttactttttaatacatgaagaaatttggacgaagacttattaaagaaaaaattatgatctcaataattatgatagaccaagttaaacaagcaatttacacttctttatatctcactaattaacttttaatggaaaagaaaataatattcaggttaaaataggattagaaataaatgacccaacaatctttccaattaataacaatgaaaattagtctttttttacatataagaagaatattattttgtgaattaaaaaataaatcaaaattaaataactaaattggaacaaaataatctttttttatatagattttttaatctaaatagtgtctaaattagattcttttcctataattgatgtattcatcatttataattttttccttccttacttaattctaaacatttgttgtcaatgataaagaacttgatatgaaggtaatgtagtgacctatggttcaagttgaaggagtggggggacattgtcatgaaattggtggagtggcctatgggatatggatcaagttgaagaagtcagagaccttaatatgggtggtctttgtagagtgtcctaaggttcaagatgaaaaaatggaggagcttgacttggacttgatggagtagcctatggttcaagttgaaaaagtggggaccttgatatggatttggtggagtagccagcgatttgtctaggagaaaattttgtttttcattttttttaattttgaataataaaattttgatagtttaaaattaattatgggttcaaattccaagtaatagaatatttgaaatttataatgcaagactttttgttatatacttagaggattgatttaaataatagttaaaatttgaagactaattaagctaaatttaattaccttagatgtaaactactcaaagttttaaaaaattgttaatattttcttaaaataaaactttcattgatttaagcaattctataccgtaaactaaaataaaaaagtttcctattttagtatttggcacaagaataaattatatttctttgttgattttttaacttatcgtatcaatatttttctttttgaaaatattatattgaacgtgagtatttttatgattgtttaaatttggcattttcaaattatttaaaaattaaaatggaaattaaaataatgtttctcctcttatttaagttgataacttgtaaaaaaatacaaaatatgatactgatttttttgagaaaaaaagttaatagtctttttcacacttctttttacataactaattaatttttatatgaaaaaaataatattcaagttcaaatacaattagaaatagaagacttgaatttttttaataaaatgttggacttttattgtttaattaacaaaattttaacgaaaggattgattaatcaaaattaaataatagttaaattcaatacaaaattttgtgtatataagaattttaaaaagggagatagataaagtaaattctaaagggagatagataaagaaagacacttgcaacagtataaataatagaagttttatgatttatatgcagaagcaagaagcacttatacaattaagttgttttccatatatgcgttgcagaagttgaagaagtcagagaccttaatatgggtggactttgtggagtgtcctaaggttcaagatgaaaaaatggaggaccttcacatggacttgatggagtagtctatggttcaagttggaaaagtggggaccttgatatgaatttggtggagtggccagcggtttataaggcaagactttttgttgtttacttatcaggtacagatttaatgaaaggattcatttgaataatagttaaaatttgaagactaattaagccaaatttaattacctttgatgtaaactacttaaagttttaaaaaaatcattaatattttcttaaaataaaaatttcattgatttaagcatttctatacggtaaactaaaataaaaaatgtttcttgttttagtatttggcacaagaataaattatatttctttgtagattgtttaagttatcgtatggattttttgttttagaatattatattgaacttgagtattctcatgattatttaaatttggcagttgcaattatttaaaaagtaaaatggaaattaaaattatgtttctcctcttatttaagttgataacttgtaaaaaatataaaatatgatactgattttttttttgaaaaaaaaattaatattcatgttacttctttttatataactaattaatttttatatgataaataaaataatattcaagttcgaatacaattagaaatacatgacacaataacttttccaattgatgataattaaatctagtctttttttcctatataagagaatattattttgtgaactgaaaaattgattaaaattaaataattagattggaacaaaataatttttttatagatgttttaatagaaatagtctttagagtacaccctttccctataattgatgtattcatcaattaattgagttagatattttaataaattgtatatttatttatctcttctatcactattcgtaaactatcaccataaatgaaatttagacaaaaactttaatatatgaagacttgtggtctaacaataaatagctaggaccataattttataatttaaaaaacatgccacacttctttgtagatcttctaatttactttttaacttaaatatgatcatagaaaaaattagaccaagacttataaaaggaaaaactatgatctcaataattatgatagaccaagttaaacaagcaatttaaacttctttgtatctcactaattaatttgtaataaaaaagaaaataatattatgattaaaaaacaattagaaatagacaacacaacaatcattaatgacaataaagattaattagtctttttcatatataagaagaatattattttgtgaattgaaaaattgatcaaaattaaacagctagcttggaacgaaataatttttttaaccaaaatagtctttaaagtaaactcttttcctataattgatttattcatcaattatattttttttccttgcttgacttaactcgcaacatttgttgtcattgacagggaacttgatatgaaggtaatgcagtaatctatggttcaagttgaagaagtcagaccttaacatcatggctggactttgtggagtgtccaaaggttcaagatgaaaaaatggaaaaccttgagattgacttgatggtgtgagctatgatttagaagacaattttcttttacattatttttagtttgaatattgaaaatttgataatttaatattaatcatgggttgggatttgatgaaatagaagacttgattttttcttaaaaaaatattggacttttgtacgtaacaaaagtttaacgaaaggattgattaaataatagttaaaatttgaagtttaatgacaccaaattttcatttaagcagtattatagggtaaattaaaataaaatgattcttatttatttttgtaaaaaaaaactgtaccaaaaagaatgtttcttatgttagtattcagcacaagaataaatcatatttctttgtttttaattttgattttttttatgcatttagtgtatatagaaattttaaaaagggagatagatacagtaaatacaaaaaatttcgtattctaagaattaattcgggagaattggataattaaatcgataatttaaagaggccagcgtaaaaaaagaatggaagaataatttagtatttggcacaataataaaaaaggtaaaaaataatgaaagtgaagaaaaaaacaggcagggcagcagtataaataatagaagttttatgatttatatgcagaaccaacaactacacttgttttcagctctaaaaaaaaacactcgttcagcttaccatgcagagagagtgtgtgcatcccaagtgagcgtgagacacttatgaagtttaagaataatctcatagatccttccaataggctttggtcttggaatcataataataccaactgttgccactggtatggagtcctctgccacaaccttacttcccatcttcttcagcttcacctccacacttcaccttctgttttctatcattactatgatggcaactatcacttcgattgggaagcttataggagatggagctttggtggagagataagtccttgtttggctgatttaaagcatttgaattacttggacttgagcggcaatagatttcttggagaaggtatgtcaattccttcttttcttgggacaatgacttccttgactcacctcaacctctctcatactggattccgtgggaagattcctcctcagattgggaatctctcaaatttggtgtatcttgacctgagttatgtttttgccaacggaacagtaccctctcagatcgggaatctctctaagcttcgatatcttgacttgagcgacaatgattttgaaggtatggcaattccttctttcctttgtgcaatgacctccttgactcacctcgacctctcttctggattcatggggaagattccatctcagattgggaatctctccaacttgatctatcttgaccttggaggtaattatctgttagctgaaaatgtagaatgggtatcaagtatgtggaagcttgaatatcttgatttgagttatgcaaacctatccttgctcaacttcaccgtaactctccaacctcttccttctttgacccacctatatttgtcagactgcacactccctcactataatgaaccatccttgctcaacttctcatctctgcaaactctccatctttccttcactagttattcccctgccatttcttttgtccccaagtggatattcaaattgaagaaacttgtttctcttcaattacagggtaatgaaatccaaggtccgattcctggtggtattcgaaacctcacacttcttcaaaatcttgacttgtctttcaattcattctcatcttctatacctgattgcttatatggtcttcatcgtctcaagttcctcaacctaggggacaacaacttccatgggactatttctgatgccctgggaaatttgacttctcttgttgaacttgatttgtcatataatcaacttgaaggaaccattcctacttctttgggtaatctctgcaacttaagggtgatacgtttatcatatctcaaactcaaccaacaggttaatgaacttttagaaattcttgctccttgtatttcccatggactcacaacacttgcagttcggagttcacgactttcaggcaatctgacagatcatattggggcatttaaaaatattgagcggctagattttttcaacaactcaattggtggaaatccatttgaaagtcttggatcactcttgatagctcagggaatagcacagcaagtcaagaggaggatgctacagtagcaacaacaggggtacacaaagcaaacaatgaggtgcaaatagagagcagaactaaaaggaagattgtgaggcccacgtacctaaaagacttcacctgaagccccgcaatcgtgtgaagaaggatctggaaacgctgaaggattcggtgctaggaaattagggagcaagaataacaaattgctgatatcctgaattcacaaaagacaaattccgttaggaggatatcagtataaatatatgatctaataacagcaccaattatcaatgaaaaatagcaagttttccttcttatcttagtttcttggaggagctggtaccctcgaaaccagtattctaaattctgcacttatcaactctctaaattgtcatctcttcatattgatggcaatctttttcacggagttgtcaaggaagatgatcttgcaaatcttacaagcttgacggagtttggtgcatcggggaacaatttcactttaaaagtgggtcccaattggattcctaattttcaacttacctatttggaagtgacatcatggcagttaggtcccagctttccattgtggattcagtcacaaaaccaacttcattatgttggactatctaacacggggattttcgattctattcccacacagatgtgggaagcactttctcaggttttgtatttaaacctctctcgtaatcatatccatggtgagattgggactacattaaagaatccaatatctatcccaactattgatctaagctcaaatcacttgtgtggtaaattaccctatctttcaagtggtgtgtttcggttagatctttcaagcaattcattctttgaatccatgaatgattttttatgtaacgatcaggaacagccaacgcatttagaatttctgaatcttgcatcaaataatttgtcaggagagatacctgattgctggatgaattggacatttcttgtggatgtaaatttacaaagcaaccattttgttgggaacttaccccaatccatgggttccttggcagacctgcagtctttacaaattcgtaacaacacactctcaggaatatttccatccagtttgaagaagaataaccaattgatatccttggaccttggggaaaataatctttcaggaagtattccaacatgggttggagaaaagctcttaaatgtgaaaatcctccgccttcgatcaaacagatttggcagccacattccaaatgaaatatgtcagatgagtcatcttcaggttttagaccttgcacaaaacaatctgtctggcaatataccgagctgtttcagtaacttgagtgccatgacactaatgaaccaaagtacagatcctcgtatctattctatagcacgatatggtaggtcttactcttccatgcaaagtatagttagtgtgctactatggctgaaaggaagaggagatgagtacaaaaacattctgggtttggtaacaagcattgatctgtcaagtaacaagttattaggggaaataccaagagaaatcacatatctaaatggattgaattttttaaacttgtcccacaaccaattgattggtcatattccacaaggtataggtaatatgagatcattacagtccattgacttttcgaggaatcaactttctggtgaaatccctccaaccattgcaaatttgagctttctgagcatgctagacttgtcttacaatcattttgaagggaaatatcccaacaggaactcaattgcaaacctttgatgcctccagcttcatcggcaacaatctatgtggtccaccactgcccataaactgcagctccaatgggaaaacccatagttatgaaggaagtgatgggcatggagtgaattggttttttgtcagtatgacaattggatttattgtgggattctggatagtgattgctcctttgctgatttgtagatcatggcggtatgcctattttcatttccttgatcatgtgtggttcaaacttcaatcttttcgctcaggtagtatcactgtttagtgttgcttagaatactctgatgttttatcattgtattggcaggttgatcaatttgtagtcattgctatcttcttctttttttcaaatttaagagccttatttaaaaattatatcaattttaaatataagaaataattaaataaaacaatattagaaaacataatatattttaaataaaaaaacattaaaaaatatataacatattaaataaacccataaaaaatatacaataaattaaataaaactaatactatcaaagttttccattttaatattttttatttaatatattttgtatatttaaaatttagataatattttaataattttattgaattttaattttttaaaatgaataaataaaatatttgtttaataattaaataaataaaattattaaaaaaatttaaaaaataaaaaatataatacaagaaaataaaaaaatttaaaagtaaaaagaaaaccaaaatgactacaaaatcgtaaaaagaaaaatagaaaataaaaacaaaacttatgactttgaaatcgtaataaaaataccttacaattttgaagtcgtaaaattttttgtctcggatattttctgttagtccaaaattattatctacctacatgatcgctaatcggccatgatgcatgccacgtgtgatattacgtgtactctttgtctgattggaaattatacatggaaaaaagttttttaaaaaaataaaaatgatgtcgtattgcccctttcttctttctcctatctgtctccatcacccttcatcttcattatatctcaccactcattttttcccctggtgggtggactaaataaaaacaagctggataaaagaatagatatgaaccatcaaaatcttaacaacaaaaaatcaaaccacaacatgaagaaaagaaaaactgtttggtggacttcagtaggtttcacacgactggattcgcagttggatttcatgtggggtttcatgatgaggtttgccaggagttggggctcattggattttgccgcgatggtggcagaggagatcacatttgttggattttatgacgaggttgcggttgaaatcacagttgggttctactaccaatatttctaccctatgaataaagataaagaaatttctacactgaatatttggaattaattaagattagctaattcaatataaataacaatatgcataaggctaaatgaattaaggaaagaaataaaaataagaaaattaagaaaggaaataaaagaaaaaattaaggagaaacttttgttagggaattttaacaaacactcgtgtatgcaaagtaaattgagattaaatcaatcaaaaaattgtccaggtttaattttattggagttcctatcaagtaattgctacatgattatatttaatagatgttatattatcattaacctgccatattatcttaactttaattaattccttaagtgaagagcactaaatccattaaactatctatcccttggattagcataaccaaacattttgcattaagataaagtatttattgatgctcaactatccttagacactccaattcgcagctcaaaggaatttttctattataattgaataaaaaatttatgcaaacaggtgatcaagtcaaaaacacatattaggcgtagaagagaaacaattgcaatattttattgaataaaaaagtagtcattacatgaaagaagaaccaaatatattaaactctaagagaagattagttcatggcaataaaaaaatataagagatacacatcacataaatgtcttaaaataacaccaacatttaagaatacatgataattatcagtatccaaacttaacttacgatacaaaataacatattaaaattttataggaatgaaaatgatatattttagtctatttttttatgcttgacataactcccaacatttgttatcagtcataaaaaactttgacgtggatttgatggagtggcctatggttcaagttgaaaaagtggggaccttgatatggatttggtggagttgtctacggtttgtctagaagacaattttttttcttttatttttaataataaaaatttgataatttaaaattaattgtagtttcaaattgcatgcaatagaagacttgaatttaataatgtaagactttttgttgtttccttaacacaggtgtaacgaaaggattgatttaaataattgttaaaatttgaagactcattattaaaccaaattttattacctttattgtaaactattaatgtttttttataaaaatatttacttaaaataaaattttcattaatttaagcaattctacacgttaaactaagaaaataaaatgtttttttttagtatttggcacaagaacaaattatatttctttgtagattatttaagttattgtatgaattatttctttagaatattatattgatcgaaggtgagtatttttattattgcttaaatttagcacttaaaattatttaaaaagtaaaatagaaattaaattatgttgctcctattatttaagctgataacttgtaaagaaaataaaaaatatgatactaatttttatgataaaaaaaattaatattcattttcaaattaattagaaatagacaattaacacaaacaacctttccaaataatgataatgaaaactgaaatacatatgcatgaagaatgcaaatcttcataagttggatatttcaataaattgtaaatttatttttctcttctatcactattctttaaatatcaccacacaagtaaaagaaattcaggcaaccactttaatatatgaagacctgtggtctaacaatagaatagctaggaccatagaaaaataatttataaaacatgccacacttctatgtagatcatatcctctaatttacattttaagttaaatatgatctacatggagaaatttggaccaagacttataaaaggaaaaactatgatctcaataattacgatagaccaagttaaacaagcattttagacttctttgtatctcactaattaatttttaatataaaaataataatatttaggttcaaatacaattagaaatagacgacacaacaatcttttcaattgatgacaatgaaaattagtcttttttcacgtataagaagaatattatcttgtaaattacaaaatgaatcaaaattaatagctagattgaaatgaaatagtctttttttatatagattttttaatcgaaatagtctttaaattagatcctttcctatagttgatgtattcatcatttataattttttccttgcttacttaattctaaacattttttgtcaattataaggaacttgatatgaaggtaatatagtgccctatggttcaagttgaagaacaagtggggggacattcacatgaaattggtggagtgacctatgggatatgtatcaagttgaagaagtcagggaccttaatatggctggactatgtggagtgtcctaaggttcaagatgaaaaaatggaggaccttgacatggacttcatggagtagtctatggttcaagttggaaaagtggggaccttgatatggatttggtggagtggccagcggtttgtctaggagaaaattttgttttccatttcttttattttgaataatacaaaattgatggtttaaaattaattatgggttcaaattgtaagtaatagaatatttgaattttataatgcaagactttttcttatttacttaacacaggtgtaacaaaaggatttgatgtaaactactcaaagattaaaagaattattaatattttcgtaagataaatttttcattgatttaagaaattatatacggtaaattaaaataaaaaatgtttcttattttagtatttggcataagaataaattatatttctttgtagattgtttaagttatcgtatgaatttgttttttttagaatattaaattgaacttgagtatttttatgattgtttaaatttggcacttgcaattatttaaaaagtaaaatggaaattaaaattatgtttctcctcttatttacattgatatcttgtaaaaaatacaaaatacgatactgatttttttgagaaaaaaaagttaatattcttttttcacacttctttttatatagctaattaatttttatatgataaagaaaataatattcaggtttgaatacaattagaaatacatgacacaacaacctttccaattgatgagaattaaatttaatcttttttcatatataagagaatattattttgtgaagtgaaaaattgatcaaaattaaatagctagattggaacaagagaatcttcttttttatatagatttttttaactgaaatagtctttaaagtacactcttttcctataattgatttattcatcaattatatatttttttccttgcttgacataacttgcaacatttgttgtgaatgacagggaacttgataggaaggtaatgcagtgacgtacggttaaagttgaagaagtcaaaccataacatggatggactttgtggagtgtccaaagggttcaagatgaacaaatgaaaaatctcgagatggacttgatggtgtgggctatatatggttaatttagaagacaattttcttttacattatttttagtttgaatattgaaaatttaataatttcatattaactatggcttgggatatcatgaaatagaagacttgattttttgttttttaaaaaaatttggacttttattgtttacataacaaaagtttaacgaaaagattgattatataatagttaaaatttgaagtttaatggcaccaaattttcatttaagcagttctatagggtaaattaaaataaaatgattcttatttatttttttgtaagaaaaactgtaccaaaaggaatgtttcttattttagtattcagcacaagaatgaatcatatttctttgctattaattttgatttttttttatgaatttagtgtacataggaattttaaagaaggagatagatacggtaaatgcataattttttgtattctaagaattaattcgggagaattggataattaagtcgataaatttaaaaagtcagcttaaaagaagaagtgaattaaaatgttaaaaaaatattttagtatttggcacaataataaaaaaaggtaaaaaaataatgaaagtgaagaaaaaaacaggcttaaaatataattgtcgtctttttttttaatatgttattttagttttttattttttaatttaaatattttatctcttatttttaaaaaatcttgtaattttagtctttttattttttaattgagatattttaaaaaaatatgtcattttagtccatttgatcaaattcttgttttttaattaggatattttgtcctttaaaagttattttgaagaaaccaagaaatacaataaaattgattgattttaataaaataagtatttcctattctaagaattaagtcgggagaattggataataaatcagattaaaaaaggaaacgtcaaaaaaagaaaaagaaaagaaagacacttgcatcagtataaaaggaaaccgttctaagaagtgaatcaaaatattaaaaaaatattttagtatttggcacaataataaaaaaggtaaaaaataatgaaagtgaagaaaaaaacaggcagggaagcagtataaataatagaagtttgatgatttatatgcagaaccaacaactacacttgtctcagctctaaaaaaaaacactcgttttctatatttgcgttgcatgatcatgaattcctcctccatttatattcttgtctttctccacctttggttatgtaggttgccttgcagagagagtgtgtgcatcccaagtgagcgtgagacacttttgaagtttaagaataatctgaatgatccttcaaataggctttggtcttggaatcataataattccaactgttgccactggtatggagtcctctgccacaaccttacttcccatcttcttcagcttcacctcaacacttcacgttctgctttcgagtatgactactataatggattctaccgtagattcgatgaggaagcttatcggagatggagctttggtggagagataagtccttgtttggctgatttaaagcatttgaattacttggacttgagcgccaatagatttcttggagaaggtatgtcaattccttctttccttgggacaatgacttccttgactcacctcaacctctctcatactggattcatggggaagattcctcctcagatcgggaatctctcaaatttggtgtatcttgacctgagttctgtttctgccaacggaacagtaccctctcagatcgggaatctctctaagcttcgatatcttgacttgagcgacaattattttgaaggtatggcaattccttctttcctttgtgcaatgacctccttgactcacctccacctctcttatactcgattccatgggaagattccatctcagattgggaatctctccaatttgctctatcttggccttggaggtcattctgttgtcgaacctctgttagctgaaaatgtagaatgggtatcaagtatgtggaagcttgaatatctttatttgagttatgcaaacctatccaaagcatttcattggctacacactctccaatctcttccttctttgacccacctatatttgtcagactgcacactccctcactataatgaaccatccttgctcaacttctcatctctgcaaactctccatctttcccgtactcattattcccctgccatttcttttgtccccaagtggatattcaaattgaagaaacttgtttctcttcaattatggggtaatgaaatccaaggtccgattcctggtggtattcgaaacctcacacttcttcaaaatcttgacttgtctttcaattcattctcatcttctatacctgattgcttatacggtcttcatcgtctcaagttcctgaacctaacggacaacaacttagatggaactatttctgatgccctgggaaatttgacttctgttgttgaacttgatttatcaggtaatcaacttgaaggaaccattccaacttctttgggaaatttgacttctcttgttgaacttgatttatcaggtaatcaacttgaaggaaacattccaacttctttgggaaatttgacttctcttgttgaacttgatttatcacataatcaacttgaaggaacaattccgacttttttgggtaatctccgcaactcaagggagatagatttaacatttctctatctctctatgaataaattcagtggaaatccatttgaaagtcttggatcactctctaaattgtcatcgcttcttattaatgacaataattttcatggagttgtcaacgaagatgatcttgcaaatcttacaagtttgaaggcgtttgatgcatcagggaacaatttcactttaaaagtgggtcccaattggcttcctaatttccagcttttctttttggatgtgacatcatggcatataggtcccaactttccatcgtggattcagtcacaaaacaaacttcaatatgttggactgtctaacacagggattttagattctattcccacttggttctgggaagcacattctcaggtttcgtatttaaacctctctcataatcatatccatggtgagcttgtgactacaataaaaaatccaatatctatccaaactgttgatctaagcacaaatcacttatgtggtaaattaccctatctttcaagtgatgtgtatgggttagacctttcaaccaattcattctctgaatccatgcaagattttttatgtaacaatcaggacaagccaatgcaattagaaattctcaatcttgcatcaaataatctgtcaggagaaatacctgattgttggattaattggccatttctagtggaagtgaatttataaagcaaccattttgttgggaacttccccccatccatgggttccttggctgagctgcagtcattacaaattcgtaacaacttgctctcgggaatatttcctaccagtttgaagaagactggccaattgatatccttggatcttggagaaaataatctttcaggatgtattccaacatgggttggagaaaagctctcaaatatgaaaatcctccgccttcgatcaaacagtttttccggtcacattccaaatgaaatatgtcagatgagtcttcttcaggttttagaccttgcaaaaaataatttgtctggcaatatacccagctgtttccgtaacttgagtgccatgacactagtgaaccggagtacatatccccgtatctattctcaagcaccaaatgatacagcatactcttcggtattaagtatagttagtgtgctactatggctaaaaggaagaggagatgagtatggaaacattctgggtttggtaacaagtattgatctgtcaagtaacaaattattaggagaaattcctagagaaatcacagatctaaatggattgaactttttgaacttgtcccacaaccaattgattggtcctattccagaaggtattggtaatatgggatcgttacaaaccattgatttttcgaggaatcaaatttctggtgaaatccctccaaccatttctaatttgagctttctgagcatgctagacgtgtcttataatcatttgaagggaaaaattccaacaggaacacaattgcaaacctttgatgcctccagctttattggcaacaatctatgtggtccaccactgcccataaactgcagctccaatgggaaaactcatagttatgaaggaagtcatgggcatggagtgaattggttttttgttagtgcgacaattggatttgttgtgggactttggatagtgattgctcctttgctgatttgtagatcatggcggcatgcctattttcatttccttgatcatgtgtggttcaaacttcaatcattttcctcgtatagtatcactgtttagtgttgcttacaaccgatgttgtatcattgtattgccaggttgttcaatttgcattgtagtcattgctatcttctttctttctttctttctttttttcaaatttgagagtcttatttaaattctgttttgggatgtacatatttgcatattgagcatatttgtagttaagatcaactagttgttcaattctgtgtatcacattcttgtttccaaaaatgggggactagtggttcatgaaaacgtggtttaataggaaaaaaacttatatttaattttagtcactaaccattgaagtgaataattagttctttcgtgttaattaaagtcgtgactcgtggctgcatacaagacttgactctccaagccggccaggccaagaactttgatgagatatccatagataaccaatgatcatggcccaagcattcttcgacaaggtcactgcccatgaaagctaccgatatcgcatcaacatttactcacttcttccattaaaaggaactggaggctgaaagtcgtaatcttcatttttatactttttagattatacaaagttggaaaaattaaaacattatgtggtgggcgaattagtgaacaaatattataagatctgcacaggttattctaatttaattctaattaagaaattaattattttccattttactccctttatgacaaatttaatttttacttataagccggtctctgataaaccttgtaccatattttaaagcaaaccgtaacacatcataaaacttagtgatctagttttagatgtcttaaagtatcgcagatagtttggagcaacaggttctccattgactagtagtagtagctagtgaccaaacttaattcgtcattatcatagccatcatacaaacctagctcacactgttcacttgcatcgatatgatcttgtctaactatcacaccataaaacactaagtgtattgatcaattaaatatataattacattaaatatttatatataaaaatgtaccatctataataattctatttctattgaacaagtagattatctttaataaaaaaataccttgtgatttaaaaataaaaaactataacacagcatcaatttttacattgctaattaactaaaaataattctaatttttatcattgaatgcatgaattatatatttgacatacggttctatcttaattaaattgatctaatattgtaacaaaaacaaattgatctaatattgtatgtagttacttttgttttctatttatttttatcttttatgaatacgcatctaaaaaacattttcagaactgaacacacaaaatgatatacgataataaattgtctaacaaattataagttttgtctttcatgtttcttcccaaattgtgtgcggtgtagcagaaggtgcaaatgctggtcgacaaatgggtgagatcaaaagctcaggtatggtggctgcaggacctgtgcactctcttcaatttctccacaaccttttgatgatgtagatctctcagatgaacctgccattgctccattccctcaatactaagtagtttctcagactcttcccattgaaaaccagtgtagccagctttcattatttttggttaatatttataaattgttctttagtactgattggtcggaatagtgtgatagattctgactctttaaatgaatggttaagaatttgaattttatcaacttttagttcttcatccttctacgaaagtgattattagtctctcaattatcttttgggcggtcttaatctataattctgtttgtcattgctcagtcactttcataaataaaaaaccactgttaaataatgatgatgcgataatcatatgatttttcacttgggttatgacgtaaaaatcatgtgataaaacgttaaggtattacaaatattttgtcatcagtgtaaaactgccaaataattaaaatttggaaaaaaaaagaaaaaggatatataataaacaaaatcaataattcacaatacacaaattaaccttttagcatgtgattattatatcaaaacctttttttttggtacctttcaatttgtcattctctagaaggacctatgtgtggacatctaaaggagtccatttatgagtgaaaattttcaaaatttgtttatcgtagtgggctaagtaggattttatattgctattcacattacccatgtgggtagaaaattagaaaattctagaaatattctttttacataaatatgattttgttatacaaatatacaatagaattatatttttattacattgtttaggacacaattctagaagtagttctttgtgttcggtttcaaaatcattaaaaattaaactcagtttatgtttggagtttttagtttcagtttattttaatttttagattttaaaaaattattgaatagataaaataatttaaatatttaatcttatcacaatccaatataaaatcatgtaatattaaaaaaatattgacacaaaaataaataaaaaagaattaaacataataaaaataattaaaaaaatattataaaaaacagtaaaggttaaaacataaacaataatcaataaattaaacaaaattttattgtttgttatatgtgataaaaaccatttcagaaagatgtaaaaaatcaacttagtgcaatttttgttgaacatgtttgtatttcgaaattatattttaaaatggaaaattgaaaattgacaatcacccctaacgcgaccttaatttttaaataagtaaaaagtattgtatgtgtggtgcacagggcagagattaatataaagccatggcatattttgttgggagaattgaaagaaggcactacgaggataccatggctgaacagagagccttatgcttactggaaaggtaatccagctgttgctgaaaccagacaagacctcatgaaatgcaatgtttctgaaaatcaagattggaatgctcgtttatttgcccaggtatcacacttcttattagctttgtttgattacacttattgaaagtagttttattatttggatatgaaaaaattaattttgtatgtaatatttcttataagcaaaagtttcattatataaaattggcttaagcacatggtgtgcagaaactagaaataacaggcaaattcaagcaagacaatggccagtagcaatattgtatataacattatacacttttttaacttttaatcttttattaatacacaacttaaaagtacattcaaaatcaaaggaaataacctgttattgaacattactgattttttccttctggacaatatattttgtctattaattgactcacaataaagccacatatatagcttccttcttgacaaatgaaaattttgtttcaggattggtttcgagaattacaagaggggttcaacaaatcagacttgccaagtcaatgcacttataggtataacattaaaactgtccatccatgcttcagttgtaattatatgtaataatatatttttgttattggatatatatgttcagtttatcaataaataaatgtttcaattcaatcatgatcgtgcagatataaggtgtacattgaaggttctgcttggtcagtcagtcaaaaatacattctgtcatgtgactctaccactctacgtgtacgactacatgtttcatctcctgaattcatatgctaaactcttcagatacaaaccctccataagtgctaatgctacagaactatgtgtggagtcaatggtttgtggagcagaaggatcagtaaagaaatttatgatggaatcattggtcaaggttcctgcaaataccgacccttgcaccatgcctgccccttttgaccctccaactttgtatgcaacatcacagagaaaggaaagctcaattcaacaagttgaatcatgggagaaaagttactgcgataatcaaaccataacatcttaatgaatattttttttttccatattcaacttaattcattcattcttagaatatcttgggaggatacaagtagaatctagattatcttgtacttggctaaagaaaccatatcatgcttgacggattatgagttttaggctttacgagaaaaaaaaattagtttgttaattttgtaatgttagaaacttattatttttcaaaatggaaatgctacaaggtaaatgctccacattatctcaattattctcttctgaaatgcatttcgcctccttcaaaattacctgtatttttctgctacaactttaagcagacaacataattcatagtagtatacatgtaagaagattcccatgcataatccctgagtagtattggtatatttgaaaaacaacactcatgctccaaaatcgcataattttaaaaatatggcaaccaaaattgaggaattaaaagttgagatccatgccaacactctattttcacatatagcctcataaacatctccatcaaagattggatatcaagttaactaatgaatcaaatttgtaaaatttgaaaatatgggaacgaaccgagcaattgaaaagtgggataccaaaatcatcctcaagtgtaattaaaaaaaaaataataagattttaatttctattacaacaagtcgttattacttattagagataaaagacttttaggactgaacgtacaataagatttgtgtaacaagcatatagttgtatgagattaaaggcaaagtgctcacaaaaataaatctccaataaggttttgcaataatgtcttttgtgagtctgtcagagatttaatacactcaagagtgtaaatattttttacactatcaactcatcaatggtttacatttcaacgtgatatgaaaatggtaatatataggtaatatttgagttaagctcatgaaagccaaattagaagccctgcaactgcaaccaaactttctaacaatctcttcccgatataagattctctattcttagctgtggccgtttcatctgtcccctgctttctaccattctgggaacttccttcaactgaatgcacaaaagaacacattaaaaataaatgcaaaatttagtactacaccattgaaactcaaaagtcaatgtcaaaaataaattccaaaaatgaaatattttgttgaaaggatcactaccagaaggagtgggcgaaggacggatagaaccaccattggatttctgatgaatttgattaaaagcttgagcttcaggtgatttaggatccaagtgcagaagtgctgatcaaataatttaaaacaagaatttcttgagaaaaatcaaacctcaaatatttttaacttcggagttgaaaactcagagataacagatacacaaacaaagtaaaattggcagatttagatgcccttgttttcccctttaaaatgtgttattgtccagttacgaatgagaaaagtagaaaactttgaagtacatgacttgttgaccattcattacatagtaaatggaatgtgacactcttttgttctttaaggaaaatgaaaggcttgataatgataaaacttagaccacaaatattctgattttttttttagaaatatactaaaattggaagatttagggtctgagtattctcagttaagaaactgttttataaaataattttagactacttagtaatcaatttctcttccaaaatatataagtttggagaatcgtatccaaaataagtgttctaaaatccaaaaaaacaaaaacatcgggaaaacgttttctctgcttcttctgttttaatcttgttcaagttccctctcaattccacattctgtgtctcacatcattctccaccaaacagtctgaagaactagtttagttgtatcttgaaaactaaaaatagtttttgaaaatagaaataaagactttttttttcctattaaaaacaggttatcatcaaacaatgaaagataaaaacataagtttttatatggccaccactaacaagacttatagatcattcattgcataggaaatggaaacataacactgtagtgtagtgttctttaagaaaaaaggaagacttaatttgaaattgaagataccagaacactgagaaattatcaggtgttttgcaaagagaagggagaccagcagcaattgtcatgttaatctttaagccaagatcaggatcatccctgtctttgagaataacgcagacacacttcttgttggtcttcatggcttgtgtgagaccactgcaacaatctgctgtgggtgctttcgtgtcaccacccaaatatggcagacacgttgtaacacctgttagggattctgcacatctctgtttgtcttgagctgaatctcccattgcatgactaaccaataccaatgttattgcaaacactagcaagtgtggtagacaagcatttgaatccatttttcaatcttgatgaatgaatgagtggagatagattatattatagtctatggaacaagtttagaatgagtatacagagcagggttgtagctagaaattgttaagttgtggtgctacatgtaaaatgttggttttttttttaaaaaaaaaattattagaaggttctgtagtgtgttatgttttagaaaacatttgggaaggaaactagtggatgaaaataaattctgtggtttcattgtgaactcacggaagaagatcatttagtttgttaacttagtctggatcatttcatgtgtgtgaatgtggagagcttagtgtttatttatttattccactaaagagttatatattatttctcgtgattatttatttatttttgtctagagcttagtgttcatatgtgtgtgaatgtggagagcttgagggagacggggtggaagacaagtttcaaataaatattgaaggtacgtcattatttaacgatggagatttaaaataaaattttttaaatattaaagattttctttgaagaaaaaatttgtcaatggtcgaatatatattatgaattaaacacattttttttttactcttttgattctcaccatcaagtttcgactaacgtcaattgttgaaacaaaggttgtggagagggcaaagacactctcttatgcacacacgagacgtggctgatcatcttttccctcaacaacaaaccggaacctgcaacatcatcccaaccatgaaggcacaaactaccattagaacgatcaacttagttcaatgctatgataccactccaacttgatgagagacaatgaagaaggagattacatcatggcaattggcaaatgctaagcttgcaggggtcggtggcagactcaagaataatggaatgtgtagtggctttgtcccatacctccattgcagttcagttgtgcctgagcttgcttccctatttttattaattttgttcatgtttatgagtgagttgaaacttcctgccgaggaccaaaaggtaaaaaaattataaatataggaaccaaaataaatgtttaaaactatagggactaaaaagaaaaattatcacaactatcaggactaaaagggtagttaaaccaaaataaaataaactagtgcaaaataatggtggtgtgattagacacttttaatcctaaatggctcgttgtagacatatatacctctacatatctgtgcattctgcaaccaccaccattagtggaataaaattttaaatgcaaacccttctatggtatattctatatacgcattattagtctaacaataaaatagctacgatacatggagaagtttgaagcaagacttataaaagaaaaaattatgatctctgtaattatggtagaccaagttaaacaagcattatatttcacacttctttgtatctcactaattaatttttatattaaaaagagaacaatttcctgattcaaatacaattagaaattaatagacgacacaacaacctatttcaaattatgacgatgaaaactagccctttttcatatataagaaaaatatcattttgtgaattaaaaaagaaacaagaatgaagaaagaaaggtggttgcggcagtataaataatagaaagaagtaagtttaatatgcacaagcaagaagcacttatacaattaagttgtttcatatatgcgttgcatgaacatgaattcctcctccattatttatattgttgtgcttgtggagctctggttgtttaggttaccttgcagagagagtgtgtgcatgaagtttaagaaatgcaaacctatccaaagcatttgattggctacacactctccaatctcttccttctttgacccacctatatttgtcaggatgcacactccctcactataatgaaccatccttgctcaacttctcatctctgcaaattctcgatctttcccgtactagttattcccctgccatttcttttgtccccaagtggatactcaaattgaataaacttgtttctcttcaattatggggtaatgaaatccaaggtccgattcctggtggtattcgaaacctcacacttcttcaaaatcttgacttgtctttcaattcattctcatcttctatacctgattgcttatacggtcttcatcgtctcaagttcctgaacctaatggacaacaacttacatgggactatttgtgatgccctgggaaatttgacttctgttgttgaacttgatttgtcatataatctacttgaaggaaccattccaacttctttggctaatctctgcaacttaagggagataggtttatcatatctcaaactcaaccaacaggttaatgaacttttagaaattcttgctccttgtatatcccatggactcacaacacttgcagatcagagttcacaactttcaggcaatctgacagatcaaattggggcttttaaaaatattgacatgctagatttttccaacaacttaattggtggtgctcttccaagatcatttggaaactttcatcattaagatatctctatctgtctattaataaattcagtggaaatccatttgaaagtattggatcactctctaaattgtcatctctgcgtattgatggcaataattttcaaggagttgtcaaggaagatgatcttgcaaatcttacaagcttgaaggagtttcatgcatcagggaacaatttcactttaaaagttggttccaattggcttcctagttttcagcttacctgttacaagcagaaatgtaaacctggtttcgaggaccaggtacctcccacacagaaaaattcagaaaggataattcttcattgccttgcttgatttattacaagtattatttatactaatccttaataacagaatgtatgtctttttgtgcctagaggatattacaggatcagagtttgttatgcttgtctcctactactcgacaagttccaagcaaggctaattgactaatttccccaattcaccctcaaacgtagtctttgaggtatgtaggcttagctattcttctcttgggcttgtttcctactagcacccctgtgtcctgtttctctgttgctgtttgcacctcttcgtgaatatctgctcctgcttgtgtgttatgatctgcttctctatcaccccgtggcccttggagaatcaccttgccctcaaggtgatattgttgacaaagctggtcccaatcctcccaagatgtgtcgtcgagagaaagaccatcccattgaaccaagacttcccaattggcgggattagtggaggacttgcagtagtcaagaatagctgttggggtgatgagtggttgatcatcaataaatgtagctggtagagtggctatcttaacatcatcaggaacacctcgaaatggcttgagtaaggaacagtgaaaaattgggtggatcttggtgccctctgggagttgtaaacgatatgcagccccaccaatcttttcgagaaccttaaaagggccataaaaccgtttggccaatttgccggaagtagcctgagaatcccgggctgatagttgacgataagggcgaagccggagtaagacccaatcatcaatagcataggtcacctctcgtcgtttagtgtcagcataggcttttatgaaggcctgtgcctttagtaatttcttacgaatagcacgaaaagtttcctcacggtcagttagcaactcatctacggcagcaatggaagatgaaccctgcaggtaattaggaaaattgggaggttttcttccaaaggtcagctcataaggagtggtgccagtggctgcaacccacgaagtattgtgggaccactctgcccacggaagcagccttccccatgatcgtggccgatgatgaacaaacacgcggaggtactgctcaataacacgattgaggacctcggtttggccatcgctctgcgggtgataggcagagctcatacggaggtgagtgccacttaattcgaagagttccctccaaaattggctgacaaataacggatcgcgatcagagactaaactccgaggtaccccgtgaagcttgacgacgatgttaatgaacagaacagcaaccgaataggcagagtgatgttggggaagcatgcccaagtggattcctttggagaagcgatccacagcgaccaagatgactgtgttgccatggaagggtggaagcccgacaatgaagtccagggagagatcctcccaaggacgatggggcgccggtaacgggcagagcaaaccagctggtttctttgtttcgtactttgtgtactggcagtccacacacttgttcacgaattgggtgacgtcggcacgaagtccttcccaataaaagttctctgaaacacgagctagagtcttggcgatgccggcatgacccccagtgggggtagcatgaaactcagtgagcagggtggggatcaatggaaaattgtgagggagccaaatgcggccacgatacaggatcagagcaccagaaatggataagtcagggtgagattctggggaattacgaatgtcatctcggcgttggcgataagtggaatcagcttcaaactgatggtggagctcagtcaagaagtgagggccagtgaccgaaagcaataatgaaacagagggcccgtgttctggtaaacgagaaagggcatcagctgccggattgtggctgccggagcgatactgtatctcgtaatcgtaccccataagtcttacaaggtataaatgctgttctggagtctgaataacctgggtgaggagctccttgaggctccgatgatctgtgatgatggtgaaatgatggcccaagaagtattggcgccattttttcacggccgcagtaatcgcgaacaactccctaacataagtggatgaacgaagcagcttctcactaaatggcttgctgtagaaggcaatggggtggccttgctgggatagaactgcccccatgcccacccccgaagcgtcggtctccaccgtgaaaggcaatttaaaatccggcaaagccagcaccagagctgaagacaaggcagatttgagatgatcaaatgcgagttaggcctcctcggtccactgaaatgaaccaattgtagtggctttaaccaatggggctgctattgttgcataccctttaatgaatctccggtaaaagcccgcaaggcccaaaaaactgcggagagccttagttgatcgaggtgaaggccagtggataatggcagtgactttcgtagccagaggttcgacacctttatgggaaactaagtgtcccaagtactcaacctgagattgaccaaagaagcatttagaaattttcagaacaaaatggttgtcgaggagtacctgaaaagcaatatcaagatgaagcaaatgatcttcgagagagctgctgtaaatcagaatatcattgaagaaaacgatgatgaactgacagagatatggccggaataacatgttcatggtcgcctgaaaagaggatggggcgttgcagagcccaaacggcataactttgaattcataatgcccgtgatgtgtccgaaaagttgtcttagggatgtcatcagggtgcattcgaattcgatggtatccctgaagaagatcgagtttcgagaaacagcatgcaccacccaactcatcaagaagctcatcaatggtgggtatcggaaaacgatcacgaatcgtgagggcattcagggccctgtagtccacacaaaaccgccatgatctattgtgtttctttaccaacaaaacaggggatgaaaacgggctagtactgggttgaattaagccttgttggagcatggcgtctacctgggtctcaatctcgtgcttttggtagtgagggtaccggtaaggcctcacattaactggggttgcttgaggtaagaggtggatatggtgatcagtggcacgagggggggggggtaaggtctgtggaggctgaaataaggcttcatacttcaagagcaagggtcgaaatgcatcaggaatgtgctcagtcaactcgggtggtgactgaggaagcatggtaatatgataataaaacccaggaccttgtttgcgatagagacgacgaaattgggatggagacagggggttcatggaagcatcaatatccccttgtaattggaccagtttgtgattgtagaagaactgcattgccaaggtattgtaatcggtgaggacggggcctaaagatttgagccactgtaccccaagcacaacattagctcctgagattggaaggacatgcaagtcaacaacgaagaccgtgtcgtgaatggaaatgggtacgtcttggcagactgagtcgcagtccaattgctgaccattaccgaccttcatgcgtaaaggagtcgtggttgtcggagagagacccaagagggtgaccagctgctgttgaataaaattatgcgtactgccgccgtccacgaggagggccacggcgtgttcggcgattgtagccacaaaacgcagcgtttcaggtgccaggtgtcccgccaaggaatttaagcttaattgggtcgggtatgtttctgaatgggtgggtgggctatcggatgggttattatccgggtcagaagaaggtagggttatatgaggcgggtcagggggttcctcctcgtccgcgatgaagaagaaaaccttagaggcgcagcgatggcctctatggtacttctcatcgcaactaaagcaaaggcccttctcacgtcgagaggccatttcatccggagataggcgtttaaaggtggtgggtaattgagggggtcgtggagagggagggggtaaaggggataacgtaggggaaagggggggggggtaaaggagtaaatcgagaggaatgtgtgggaggtggaggagggggtcgaggtcgtggcggtagtgtggtggggcgttggtcgcgaagcttttcttcctggaggcgagcgaggccagctgcctgagagatcgtgagaggctgatgagcctgtacctcacggcgaatctccggggtgagcccggagacaaagcagctaaggaggaatggcgctggtaggcccacgatgcaattagcaaggtcttcaaactccgccaggtaagttgaaacagaacccttctacatgagtttgaacagagaccccgtggggtcctcgtactgcgacgacgcgaatcgtgtctgaagcgcctgtagaaacatcggccacgaagtgaagtgaccattactggtcatccactgaaaccaggccagggcacggccctccatgtagaaggaggcaatcgtgagtcgatcatactccggtgtgccatgatattcgaagtattggttgatcttaaagatccaacctaacgggtccgttccatcaaatcgaggaacatctaacttcattctgtgttgcaatgcaggtacagagggtgtggtatgaactggggtgggattatgtggtggagaagacgagaagaaaggggtgactcagtgtataagctcgtcaagacgatgggtgatctgggtcatggattcaccaagggagcgttgctggttggtgagggaaagctgttgattcgtgagaagaatcagagcagcctctaatttgtcgggattggatgaagaaacgaaggggtcagtcatggtgaggatcaacgagagcaccagttgttacaagcagaaatgtaaacctggtttcgaggaccaggtacctcccacacagcaaaattcagaaaggataattcttcattgccttgcttgatttattacaagtattgtttatactaatccttaataacggaatgtatgtctttttgtgcctagaggatattacaggatcagagtttgttatgcttgtctcctactactcgacaagttccaagcaaggctaattgactaatttccccaattcaccctcaaacgtagtctttgaggtatgtaggcttagctattcttttcttgggcttgtttcctactagcacccctgtgtcctgtttctctgttgctgtttgcacctcttcgtgaatatctgctcctgcttgtgtgttatgatctgcttctctatcattacctatttggatgtgggatcatggcagttaggtcccagctttccatcgtggattcagtcacaaaaaaaacttaaatatttaggcatgtctaacacagggattattgattctattcctacacagatgtgggaagcacaatctcaggttttgtatttaaaccactctcataatcatatccatggtgagcttgtgactacattaaaaaatccaatatctatcccaactgttgatctaagcacaaatcacttatgtggtaaattaccctatctttcaaatgatgtgtatgggttagacctttcaaccaattcattctctgaatccatgcaagattttttatgtaacaatcaggacaagccaatgcaattagaaattctcaatcttgcatcaaataatttgtcaggagaaatacctgattgttggattaattggccatttctagtggaagtgaatttacaaagcaaccattttgttgggaacttaccctcatccatgggttccttgtctgagctgcagtctttacaaattcgtaacaacacacgctcaggaatatttcctaccagttcgaagaagaataaccaattgatatccttggaccttggggaaaataatctttcaggaagtattccaacatgggttggagaaaagctcttaaacatgaaaatcctccgcctttgatcaaacagttttgtcggtcacattccaaatgaaatatgtcagatgagtcatcttcaggttttagacctttgcacaaaacaatctgtctggtaatataccaagttgtttcagtaacttgagtgccatgacactaatgaaccaaagttcagatcctcgtatctattctgtagcacaaaatagtacacattactcttccggatatagtatagttattgtgctactatggctgaaaggaagagaagatgagtaccgaaacattctgggtttggtaacaagcattgatctgtcaagtaacaaattattaggagaaatacctagagaaatcacaagtctaaatggattgaactttttgaacttatcccacaaccaagtgattggtcatattccacaaggcattggtaatatgggatcattacagtccattgatttttctaggaatcaactttctggtgaaatccctccaaccatttcaaattcgagctttttgagcatgctagacttgtcatataatcatttgaagggaaaaattccaacaagaaaacaattgcaaacctttgatgcctccagctttattggcaacaatctatgtggtccaccactgcccataaactgcagctccaatgggaaaactcatagttatgaaggaagtgatgagcatggagtgaattggttgtttgtcagtgcggcaattggatttattgtgggattctggatagtgattgctcctttgctgatttgtagatcatggcggtatgcctattttcatttccttgatcatgtgtggttcaatcttcaatctttttgctcatgcagtatcactgtttagtgttgcttagaatacactgatgttttatcattgtattggcaggttgatcaatttgtagtcattgctatcttctttttttttcaaattttagagccttatttaaattcagtttttggatgtaaagatttgcatattgagtatagttttgtacttaagatcaactagttgtaattctctgatagaaaatattagctagatcacgtagattaaaattgaaatagttggtaagtactcttgagttttggaaccacatgttgggaatctctccaatttagtgtgcactggataatactattctctaatccaaaccacatattcgcttgaattttatttacttaagatcatggatgcattcttgcccactttaaaatcaaccttacctttaataagatttattcttttacatgtatccgttttgcaattatgtacaacttaaaaggaaaagagacaatgcttggcttcatcaagaccagtggcaaggaacaggagcacgatagcaaaaaagcataagcatgacatgcttgcctgctactggtatttaagatctataaaacattgaaaacattacattgtgaacatttcacgtgaatcattcgaaactacaatctattgtatcctgtatgaaaggccatttgcagaattaccctcctcttaaaagccaagtttgccaaattattgttgaaatttatgtgtgtggactccaactatgtatggccaggtatggaggcttcaaaagtaggacttgggttgctcaaatttgagagacaaagtgttgtgccgcaagacgacgcaaaatctttccggtggcagtcttgggcaaagaatcagtaatgaagacctttttagggactttgaaagatgcaagattcttcttgcaatatcttagcacctctgcatcatcaatgtttgatccttctcttgggatgacagcacactatatctattaaaaggtaaaaataaatatgatcaatacaaattgcaaagaactaatagacccatcatttgagcaaatagcaatccacaaatttctgattttttttttttcatttattcctctcctagtacaaacaagaaaaaaggtcatatactaatcttttgagaattttgaattaattatgaagattacgaaatattgaacattttaaggaaattttggtaatattgatgaaaaacaataaaggttataacaatttatttcacaagcacagagggtcactaagtgcgtgagaaagcaagcaagcaagctgttgctaggtaacaagttgttttttgttggggagaatgacatcaaaaggttatgaagtagctgaccgtttcagaagttaattagtcatgcgtagccaatattacacgaaacgcttttcagatttggttaattttacctttcggggaaactaaagttaggaaagtaattttttgtcacatggtaatccaaagctaggtattatcatgtcatgtcatgtgtgcttaaaaacaaactttatgccacaggttcatagatacatataggaaatttcaatccatcacaaattattcttgctagggagaaactataatgtttctatgataaaaaaaaaaaaaaaactaggcttgccatccctttgagatctttcctttgagaatatttcagtaatgttgagagcttgttatatttagttctttggtttgttatagaaaattccttggagaagatcattcatggaaagccctctgggattgacaacacagtaagcgcatacgggcttttctttgtggattaggaatgaatacattcttggggatttctttgtggcttattgttttcctaggaacaactttatgcttacaagtctactgtttctattactattattaaagttattacttattaatgatcttttacctctccgaggttaatatggcaatagccaaatccatatttaatttagtcattgtcttttaaatttgtctctattttacttgattagagtgtgatctttgagggcaaaaattgataaaagttaaatgccacataaatcctcagattcggtttggtttgactttcatgcacatgttactaagaaattaaaaaaaaataataaatattttatatcaaaatatataagagatatatgatacagaatagtttgtagtaatagtacttgacttatattttcaaagacttctctatataaacaacattatataaatgcactttcattatttttggaaatgtctatttttttttcacctaaaggaaaggaaaacatcatggaggaaatgttctctaaaaacaatttgttcttcatatccttattttgaaacaaatcttttaaaaatttgaagtggtggttaaaaatatttcaatttgatttttccttgcataccacatttgtgttaagcaaaatttagattcccatatagcatctccggccaatatcccaaatacccataaacaaatgtaaatgtagaatgatttagatttatttcttaattattgttaaaatataattgaaaaacaaaaaattatttgtaaatttaatatcctggatttaatacattcatgtgattatcaatgaattaatcgttacatcaacattgttctccaatgatattggatgttcgttttgcaacaaatgatacgcgattgaagaaatatcagttattatcaaatgaaattaagtgcaataaatattagttgtccagtatcaattatactacgaaattaatgattaaattgttaaatatttttatgataataaatacgggatttttttataattagaatttaatacaattatttaaattaggtatcaattattcttaacggatacgaaaactaatgtcccaatttgaattaaaaaagaatttgattcactaaaaaaaacctatatgcaaaaaatttggtataaattaattttaatgtgtagctaaatataaaattgaatgggaaaaattcacatataactatatggtatagtaatgcgatgtttaatctgatgcgagatgaaatttgatagtcaagcctccaaaccaatccgtgaatttcatacggtgtaactaagtgattgtccaaacaacaaaatattaaagaaaattttcaaacaacaatgaacacaactagaagaaaagataaataataaacaaatcacgtaaaaccatgttacttatataaggaaaaaatgtgtactccatgattaaagtttaatcatgcaccataacaatttagaaaaattctatattaaaattaaagtttaaatgttttatttattgtaatgcatgtacgtttcattttaatatgcactcaatgacaaatacgtttcattttaatcaaccctataattctacaacgatttttaaatacggaactcatcatggatttttgattttatcatagctcataattatataaagattttctcaacaaaaaaacacacctacacaaccacacctactattagacaaaaaaacatagaccaaaacactattaaacaccaaatgaaattaaatatgtttttattcttaataaatactcaaattttgtgtttgttttctaataaattattattttacattgagttcctaataaattaaccctaaatgaaattaaatattgatattattgttgttcttctacctccaacgttggttggctcgatatatgtgtgtgcttattttaacgttattagatgctacttgtttatttcgtacgctattgttgtctgaagcatagacacgttgtggaattccttagaaattgttaggaatggtgtgtgagaattccctcggcctgaggcatacgcatggttgaggacaaaacaaaattaacacattgtcatttcgtcgcatggttgagttatgatatttagacatttaggtttattgtaaaaattaaggttatagtatatcaagatagtatttctatctttttacggctattttgacaattggactctttttttttttcaggagtgtgtgatttaggctcattcaatttagaaacactacatgattatacagagacttgcttataatattaagataattgtatatttaattaaatgaatttgatgatataaagatgatcgtgaaaagtttacgaaagatagtgtgcgtgagcaagaggaatatgttagctatttaggtgtaacttattggaaagtaagacatagtcatgtagatgtggtaggtttaacccttgctgccaaagtaaaaaattaagtggaaaaaaaaagatagaaaccctcagggtagcttatagttaggagggctcaatatgtctcccttgaccaaacaatttttataaaatcataatatttttgtgtgtaaaatttactttaaaatacatttagtaaaacattttagttttagctttataattttaaaaacctaagacttaatatatgagaaatatttgctaaataaaatatgagatcagctgaattttttattttaataaattttaatataaaaaataatatattagaaaagtgcatgtgttaacatttctcttgaaatgattagtgtctttgctagcctatgttcctaaccgcaacaggcgccagaaattgtgggttgtaagaagtctttgtaaatcacatgtccttcaaaaaaaatccaaataaactgaaacaatgtttgactgatctatttcctatcttcaaagttaaaggcaagtctctggagaagatgacttcgataaagacacaataaaactgcttctggtgaagagggaatttcaagacattggttcttccccaaaagcaacttaactctaatgagaatgtgaaaactgaacaagaggatatatagtctaaaaccaactaacattccaaaattcctcaccaaccatccctattatatttgacaaccacacccgtgatgaaaattatagtgcggtctcattccactgtctcaattaaataaaaaatatacaaaatatcacaataaggatatgttaattaagaatttaatttaaatacactttcatttgcaattaattaattatatatatttcctataacttttttagtaattgttttacaaatcatttggtgatttctaattaattaacaatttaaatttttacactatctatcaaaattaaactcatatattaacagcatcaaagttattttcgttttaattttgatacttttgttctaattaagtagtactagcagttgccattctcattattttattatacgtacattctacattctgcttacaacttgcaatgaatggaaaaagtggggcttggacatcatttgtctgcatgacattcacaccactcaccaaaagtgagtggaaatttttagacaaaatagatgaagaattattaatgttcaaccatcattggaagtggaaagttcattatgagaaagaaaagcagttcgccaaaatggaaagcagtaggtaaagaaagctcaagtaattttcaacttatagacattccatgtagagataagaaatgacagttcatagaaaagaaaaggaaaaaaaaaatgatggcttaaagatctttatctttgagctgtttgtctctactaatcaactatagttagctattttaatttatgattgtcaacttgagataccattaagataaaagtggtgtgaaaaaagagcatcaaagtaggcgtacgtatggcgtcgatcaagagtcacatcacttgttctgtgagggaaacaaaaaacattacaagttcaaaattaaaaataatagaattccctttataaaacacatatataatttgtttctcaattctcataagaaaaaaccacttgcactaatgggttggtacaatggtccttgtggcagccatcatgcacaacaatgcaaattccctgacttggtaaaaaaggctaggaaggaattcgtaaaacccactgaatcaaattcttttgtaacatttggaaatatgtgagtgagattttcaaaacaccaaacagttatagtatcaaatgttgtatcttcaaatttggcttctttctacgaaataaagttgcaaaaacggaagaccgagagcttaattagacatagaattcaaatggagcatgccatcattgacatgaagactgatgagaagtttgaaataacatttcttacatagaattcaaagatttcagacgtagtccattgtttagaataaactgctgcatatatataacccgttgttaaaaaaagtaataaaaaaataaaaggtttaattatccttttgatccttaaagttacgacaatattttttttagtcgttgtagtttaactcatgggaccagaaactcacaatcacacactttatctgcagcaatcaaaaccatcatcccattggaacgatcatcttagttcaatgctgtgataccactccaacttgatgagagactgtcaagaaggagattacatcatggcaattggcaaatgctaagcttgcagaggtcggtggcagactcaagaataatggaatgtgtagtggctttgtctcatacctccattacacttcatttgtacctgagcttgcttccctatttttattaattttgttcatgtttatgtgtgagttgaatcttcccctcgaggatcaaaagataaaaaaattgtaaatataagaacttttttatagggatagacaccaaaatctaagaatacatgataattatctatcatccaaacttaactcaggataaaaaaagtagcacactaaaattttatagggatagaaatgatatattttaccctattttttttcatgcttgacttaactctcaacatttgttgtcaatgataagaaactttggcatagatttgatggagtggcctatggttcaagttgaaaaagtggggaccttgatatggatttggtggagttgtctgtggtttgtctagaagacaattttttttcttttcttttattttgaataataaaaatttgatcatttaaaattagttataggtttaaattgcatgtaatagaagacttgaatttaataatgcaagactttttttgttgtttatttggcacaagaataaattatatttctttgtagattatttaagtgatctcatgaattattttttaaaaatattatattgaacgtgagtatttttatgattgcttaaattttgcacttaaaattatttaaaaagtaaaatggaaattaaaattatgttgctcctattagtatttaagttgataacttgtaaagaaaataaaaaatatgatactaatttttatgataaaaaaattaagattaattttcaaattaattagaaatagacaattaacacagcaaattaatatttccaaataatgataatatataaactgaaaagcttatgcattaagaacgcaaatcttcataagttagatatttcaataaattatatatttatttttctcttctatcactattcttaaaatatcaccacacaagtaaatgaaattcagacaaagactttaatatatgaagacttgtggtctaacaataaaatagctaaggccatagataaataatttaaaaaaacatgccacacttcttggtatatcatatcctctaatttactttttaagctaaatatgatctataatatatgaagaaatttggaccaagacttataaaagaaaaaagttatgatctcaataattatggtagaccaagttaaacaagcattttacacttctttgtatcttactaattaatttttaatgacaaagaatataatattcaggctaaaatacaattagaaatagacgacacaacaatctttccgattaatgacaatgaaaattagttttttttcacatataagaagaatattattttgtaaattaaaaaatagatcaaaattaaatagttagattgaaacgaaagagtcttttttatatagattttttaaccgaaatagtctttaaattagatcattttcctataattgatgtattcatcatttataatttttttccttgcttacttaattctaaacatttgttgtcaatgataaggaacttgatatgaaggtaatgtagtgacctatggttcatgttgaagaagatagagacctaaatatggttggctggactttgtggagtgtcctatggttcaagatgaaaaaatgaaggacattgacttggacttgatggagtagtctatggttcaagtgggaaaagtggggtccttgatatgaatttggtggagtgggaagtggtttgtctaggagactagacaattttgttttcatttcttttatttggaataataaaaaattgatattttaaaattaattatgggttcaaactgcaagtagtagaatatttgaattttataagacaagacattttgttatttacttaacacgtacatgtttaacgaaaggattaattgatttaaataatagttaaaattttaagactaattaagccgaatttaattacctttgctgtaaactactcaaagttttaaaaaaattattaatattttcttaaaataaaaatttcattgatttaagaaatcctatactgtaaattaaaataaaatgtttcttattttagtatttgagacaagaataaaatatatttatttgtagaagattatttacgtttcgtataaatatattttttagaatattatattgaacgtgagtatttttatgattgtttaaatttggcatttacaattatttaaaaagtaaaatgaaaataaaaattatgtttctcctattatttaagttgataacttataaaaaatacaaaatatgatactattttttatagaaaaagttaaattttttttcaccacttttttttttatcaataattaatttttatatgataaaggaaatcatatttaggtttgaatacaattaaaaatagatgacacaaacaaccttttcaattgatgaaaattaaatttagtcttttttttcatatataagagaatattattttgtgaaagccaaattagagttaagccaaattggtaatatatatatatatataggcaatatttgagttaagctcatgaaagccaaattagaagccctgcaactgtaaccaaactttctaacaatctcttcccgatataagatgcactattcttagctgtggccgtttcatctgtcccttgctttctaccattctgggaacttccttcaactgaatgcacaaaagaacaccaattgtccactaaagagttatatattatttctcgtggttatttatttatttttgtctagagcttagttttcatgtggagagcttgagacgggtggaagactaagtttcaaatgaaactttttttagtaattgttttacaaatcattaggtgatttctaattaattaacaatttaaatttttacactgtgtatcaaaattaaactcatgtattaacagcatcaaagttattttcgttctaattttgatacttttgttttaattaagtactacgtactagtagttggcattctcattattttattatacgtacattctacattctgcttacaacttgcaatgaatggaaaaagtggagcttggacatcatttgtctgcatgacattcacatgtagagataagaaatgacagttcatagaaaagaaaaggaaaaaaaaatgatggcttagagatctttatctttgtgtgagtgttactgcttgcacctccttgcttgctatgctatcatttacttaacaaaggtgtaacgaaaggaccgatttaaataatagttaaaatttgaagactaattaaaccaaatttaattacctttgatttaaagtattaaaaaaatgtttaatattttcttaaaatgaaatttcattgatttaaacaattttatattgtgatctaaaatatttttattttattttagtattcgatctccataagaataaattatatttcttagtagattatttaagttatcatatgaatatttttttttgagaatattatattgaacatgataaattttatgattgcttaaatttggcaattaaaattatttaaaaattaaaatggaaattaaaattatgtttctcctattatttaagttgatggcgtgtaaaaaaaatacaaaatatgctactaattttttttagaaaaaaattaatattcttttgcacacttctttttatatcaccaattaatatttatatgataaagaaaataatattcatgtttgaatacaattagaaatagatcacacaacaaccattccaaatgacgattaaatctagtcttttttcatatataagagaatattattttgtgaattaaaaaattgatcaaaattaaataacaagatatgaatgaaataatctttttttatatagattttttaactgaaatagtctttaaattagaccattttcctataattgatgtatttatcattaatatattgtttgtgccctatgggctatggttcaagttgaagccagagaccataacatggctggactttgtggagtgtccaaaggttcaagatgaaaaaatacaggaccttgagatagacttgatggagtcagctatggtttaattaacaaaataatatttaaattaacaaaagttgaacttttaataaaaggcttgaattaaataatagttaaattcaataccaaattttgtaataattaacaaaagttgaattaacaaaattttgtaaaagacttgaattaacaaaagttggacttttaataaaagacttgatggagtccatgaaatagaagacttgaatttttttaataaaatgttggacttttattgtttaattaacaaaagattaatgaaaggatagattaaataatagttaaattcaatataaaattttgtgtatataggaattttaaaaagggagatagataaagtaaattcaaaattatttcctattctaagaattaactcgggagaattggataataaagtcaataattaaaaaaaggaaacataataaaaaaataaaaaagtcaagaaagacacttgcagcagtataaataatagaagttttatgatttatatgcagaagcaagaagcacttatacaattaagttgttttctatatatgcgttgcagaagttgaagaaggcagagaccttaatatgggtggactttgtggagtgtcctaaggttgaagtagtctatggttcaagttggaaaagtggggaccttaaaatggaggaccttgacatagacttgatggagtagtctatggttcaaggttgaaaagtggggaccttgatatggatttggtggagtggccaacggtttctctaggagacaattttgttttcatttcttttattttgaataattaaaatttgatatttaaaattaattatgggttcaaaccgcatgtaatagaatgtttgaattttataagacaagactttttgttgtttacttaacacgtacaggtttaacgaaaggattgatttgaatgatagttaaaatttgagaaaaaagttaatattctttttacttcttttatataactaattaatttttatatgataaataaaataatattcaagttagaatacaattataaatagatgacacaataacttttccaattaatgataattaaatctagtctttttttcctatataagagaatattattttgtgaactgaaaaattgattaaaattaaataattagattggaaggaaataattttttttatggattttttaatagaaatagtctttaaagtacacccttttcctataattgatgtattcatcaattaattgagttagatatttcaataaattgaatatttatttttgtcttctatcactattcttaaactatcaccataaatgaaatttagacaaaaaatttaatatatgtaaacttgtggtctaacaataaatagctaggaccataattttataatttaaaaaacatgtcacacttctttgtagatcttctaatttactttttaagttaaatatgatcaacaatacatggagaaatttggaccaagacttataaaaggaaaaactatgatctcaataattatgatagatcaagttaaacttctttgtatctcactaattaatttttaataaaaagaaaataatattatgattaaaaaaacaattagaaatagacaacacaacaatcattaatgacaatgaagatttattagtctttttcacatataagaagaatattattttgtgaattgaaaaattgatcaaaattaaatagctagcttggaatgaaataattttttttatagatttttttaaccaaaatagtctttaaagtaaactcttttcctataattggtttattcatcaataatattttttttccttgcttgacttaactcgcaacatttgttgtcaatgacagggaacttgatatgaaggtaatgcagtgacctatggttcaagttgaagaagttaggccttaacatcatggctggactttgtggagtgtccaaaggttcaagatgaaaaaatggaaaaccttgagattgacttgatggtgtaagctatgatttagaagacaattttcttttacattatttttagtttgaatattgaaaatttgataatttaatattaaatttgatgaaataaagacttgatttttttcttaaaaaaatgttggacttttgtacgtaacaaaagtttaacggaaggattgattaaataatagttaaaatttaagtttaatgacaccaaattttcatttaagcagtattatagagtaaattaaaataaaataattcttatttatttttgtaaaaaaaaactgtacctaaaagaatgtttcttatgttagtattcagcacaagaataaatcatatttttttgttattaattttgatttttttatgaatttagtgtatataggaattttaaaaagggagatagatacagtaaatacaaaaaatttcgtattctaagaattaattcgggagaattggataattaaatcgataatttaaagaggccagcgtaaaaaaaagaatggaagaatattttagtatttggcacaataataaaaaaggtaaaaaataatgaaagtggagaaaaaaacaggcagggcagcagtataaataatagaagtttgatgatttatatgcagaaccaacaactacacttgttttctatatattcttgtgtgatcatgaattcctccatttatattcttgtctttgtccagctttggttgttgagcttaccatgcagagagagtgtgtgcatcccaagtgagcgtgagacacttttgaagtttaagaataatctcatagatccttccaataggctttggtcttggaatcataataataccaactgttgccactggtatggagtcctctgccacaacgtcacttcccatcttcttcagcttcacctccacacttcaccttctgctttctatcatgactatgattaccagtatctcttcgatgaggaagcttataggagatggagctttggtggagagataagtccttgtttggctgatttaaagcatttgaattacttggacttgagcggcaatagatttcttggagaaggtatgtcaattccttctttccttgggacaatgtcctccttgactcacctagacctctcttatactggattctatgggaagattcctcctcagattgggaatctctcaaatttggtgtatcttgacctgagttcagatgttgccaacggaacagtaccctctcagatcgggaatctctctaagcttcgatatcttgacttgagcgccaattatttacttggaggaggtatgtcaattccttctttcctcgggacaatgacttccttgactcacctcaacctctctcatactggattcatggggaagattcctcctcagattgggaatctctcaaatttggtgtatcttgacctgagttctgtttctgccaacggaacagtaccctctcagatcgggaatctctctaagcttcgatatcttgacttgagctacaatgattttgaaggtatggcaattccttctttcctttgtgcaatgacctccttgactcacctcgacctctctcatactggattcatggggaagattccatctcagattgggaatctctccaatttggtctatcttgacctcggaaattatttttccgaacctctgtttgctgaaaatgtagaatgggtatcaagtatgtggaagcttgaatatctttatttgagttatgcaaacctatccaaagcatttcattggctacacactctccaatctcttccttctttgacccacctatatttgtcagactgcacactccctcactataatgaaccatccttgctcaacttctcatctctgcaaactctccatctttccttcactagttattcccctgccatttcttttgtccccaagtggatattcaaattgaagaaacttgtttctcttcaattactggataatggcatccaaggtccgattcctggtggtatccgaaacctcacacttcttcaaaatcttgacttgtctttcaattcattctcatcttctatacctgattgcttatacggtcttcatcgcctcaagtatctggacctaagttacaacaacttgcatgggactatttctgatgccctgggaaatttgacttctcttgtcgaacttgatttgtcacataatcaacttgaaggaaccattccaacttctttgggtaatctctgcaacttaagggtgatagatttatcatatctcaaactcaaccaacaggttaatgaacttttagaaattctagctccttgtatttcccatgaactcacaactcttgcagttcagagtacacgactttcaggcaatctgacagatcatattggggcatttaaaaatattgagcatctagatttttccaacaactcaattggtggtgctcttcctagatcatttggaaaactttcatcattaagatatctcgatctgtctattaataaattcagtggaaatccatttgaaagtcttggatcactctctaaattgtcatttctcgacattagtggcaataattttcaaggagttgtcaaggaagatgatcttgcaaatcttacaaacttgacggactttggtgcatcagggaacaatttcactttaaaagtgggtcccattggattcctaattttcaacttacctatttggaagtgacatcatggcagttaggtcccagctttccattgtggattcagtcacaaaacaaacttcaatatgttggactatctaacacggggattttcgattctattcccacacagatgtgggaagcactttctcaggttttgtatttaaacctctctcgtaatcatatccatggtgagattgggactacattaaagaatccaatatctatcccaactattgatctaaggtcaaatcacttgtgtggtaaattaccctatctttcaagtgatgtgcttcagttagatctttcaagcaattcattctctgaatccatgaatgactttttatgtaacgatcaggacaagccaatgctattacaatttctgaatcttgcatcaaataatttgtcaggagagatacctgattgctggatgaattggacatctcttgtggatgtaaatttacaaagcaaccattttgttgggaacttaccccaatccatgggttccttggcagacctgcagtctttacaaactcataacaacacactctcaggaatatttccaaccagtttgaagaagaataaccaattgatatccttggaccttggggaaaataatctttcaggaagtattccaacatgggttggagaaaaccacttaaatgtgaaaatcctccgccttcgatcaaacagatttgccggccacattccaagtgaaatatgtcagatgaggcatcttcaggttttagaccttgcacaaaacaatctgtctggcaatataccgagctgtttcagtaacttgagtgccatgacactaaagaaccaaagtacagatcctcgtatctattcttaaggacaatatcatggtaggttttactcttccacgcaaagtatagttagtgtgctactatggctgaaaggaagaggagatgagtacagaaactttctgggtttggtaacaagcattgatctgtcaagtaacaagttattaggggaaataccaagagaaatcacatatctaaatggattgaattttttaaacttgtcccacaaccaattgattggtcatattccacaaggtataggtaatatgagattattacagtccattgatttttcgaggaatcaactttctggtgaaatccctccaaccattgcaaatttgagctttctgagcatgctagacttgtcttataatcatttgaaggggactattccaacaggaactcaattgcaaacctttgatgcctccagcttcatcggcaacaatctatgtggtccaccactgcccataaactgcagctccaatgggaaaacccatagttatgaaggaagtcatgggcatgcatatggagtgaattggttttttgtcagtatgacaattggatttattgtgggattctggatagtgattgctcctttgctgatttgtagatcatggcggtatgcctattttcatttccttgatcatgtgtggttcaaacttcaatcttttcgcttaggtagtatcactgtttagtgttgcttagaatactccgaagttttatcattgtattggcaggttgatcaatttgtagtcattgttatcttcttttttttttttcaaatttgagagccttatttaaattctgtttttggatgtaaagagggagagtagctgaacgtaaagaggggaaggataggaggtgtggggaaatggaactaaggataaccaagtaatttcaaatgctttggtagtctcaatagcatttttggtagtgacaatagtagcccatatatatatataaatgattatatgtgtgataaaacaaaatccaggatagataaaacaacccataccaactatacaaattacaagttaattattatttttacatattttgatgcacaataaatagcgccaacacaacaatgttatatttactaatatattttttaatattaactattttaatacaattaatactgttatttgaacaacatagacattatcttcattttttttccttcaccgtcttcacccatctccctttgttactaaaaaatgtaacaattacagtaaaagttaatttcttatgaaacatgcttcatttagcttattttaaaaattaatgtgataacatttttaatagatgaaaataaagaagagtaattattttaaaaagaattatataaacatacacttattagtattggatatgatgactttacactccatataaaacaaattcaataaacgatacctgaatcttttgttcataaatttagggacatgaaaggtgcatagatttttctagtagtgtcacagtcctactattgtacgtatcccactttttctctttttcagaatgatagatacaaccacgcatattgtttctggttctatactcctttcaggacagattcctccatgaacagtggtatttggctaaagagtgttgtgtaggtacgtataaaaaaaacaattcgacacgcaaatttccaaacagagcactaaaatggcaaatattacatacctggatataactaaatttgggtttatacaactgactaataaaattttaaaaaacagtttgccattgcaatttctacttgatcatgatttactaaacattttctttgaggagtctttgtaattgcaacatgacaataattaattatgactgtatcaattatatttgtccatagtattttccaatacaaaaatcacgagaaaactataacaacaactgtggtgggtgaatgcatgcaagtgatgcaacacaaaccttggggtggggtcgatccaattcagatggctatgactaggagggatgatctaggcccaaaatgtttgaactttgaatctacatttgggcatatatatgtgtactctgccaatacaaaacaattattttatatttttatcatttaatattcagtctctcttttacactattaatacatagaccttgagtgagtttatcagatgtgcatcaagcattttttttttctgtggctgtgcaagatcttttacagttgctgatgtgtgtaattataaccaccgccatgattggtatgagcctctgtctaatcttaaagtaatgcttttctgtctttgatgagtgttaaattgactcaatataatttttgtagttataaacaattgtactttattataaagagtttttatctgcaatttaagtaacacgtttaatcataaagtaatagtatatacgtactccgaacaatggtggaaacaaaactaacaatgatcgacatggtagttatcggactaatttaatagtatgaataacacaacaattgattcagggggaaataaaataaagtgaaaaaacttgtgtaaaagacaaatacactttgatgaaggggatctaaattgttttacaaaacatgaaaccatattcgacttagctggaattatggttagagtaacatgcaagtaactttgttactttgattttgatgttactccacacaggaaaaatgatatatatagtaacataacaagcataattaattagtttgccttattttacacaaagaatcaaattttaattttgtttatgatatcaagagtctaatccatttgattcaacagactatacgtgagctgttagaatcaagaatttaaaattaattttattcatttaatcaataaggtttaatcgttagtggaagcagagaatggagaatggagacacatgagatgatgcaaggaacaaaagtttatgcaagtgctatcaaccgacatgttagatgatgcaaggaacaaaagtttacgtcaaaatactaaaattatatatagcgccgttatttaacaacgatttgacaatcgacgattcctaaggatatattgaaacctgcggcaaacaactgaggcaaaccacgtgaaattaaggaatataattctcgaagaattaaggaatttttgctatgtagcagtagtaattaactagtttttttatgtataaaagtagtaattaactagtagttaagaagttgttttgtgagagtttttgtattaatataaaataaaattgtattagaaaaattaaataaataatgctgtacattcatactgcatggtcaataatttcaatctttttgttcatgtagtatcactttttagtgttgcttagaataaaccgatgttttatcattgtattggcagattgatcaatttgtagtcattgctatcttcttttttttcttcaaatttgagagccttatttaaattctgtttttagatgtaaagatttgcatatttagtatagttttgtacttaagatcaactagttgtaattctctgatagaaaacattagctagatcacgtagattaaaattcaaatagttggtaagttcttttagttttgaaaccacatgttgggaatctctccaatttagtgtgcactggataatactattctctaatccaaatcacatattcgcttgaattttatttacttgagataatgaatgcattcttgcatgcccactttaaaatcaaccttacctttaataagcattattctttcacatgtacccgttttgcaactatgtacaacttaaaaggcaaagagacaatgcttggcttcatcaagaccagtggcaaggaacaggagcacgatagcaaaaaagcataagcatgatcttgtctgctattggtatttaagacctataaaacattgaaaacattacattgtgaacatttcacgtgaaccattgaaaactacaatccattgtatcctgaatgaaagaccatttgcagaattaccctcctcttaaatgccaagttgccaaattattgttgaaatttatggtgtgtggactccaactatgtatggccaggtatggaggcttcaaaagtaggacttgatcagttgctcaaatttgagagacaatgtgttctgccacaagacgacgcaaaatctttccggtggcagtcttgtgcaaagaatcagtaatgaagaccttttcagggactttgaaagatgcaagattcttcttgcaatatcttagcacctctgcatcatcaatgtttgatccttctcttgggatgacagcacaatatatctattaaaaggtaaaaataaatatgaccaatacaaatttcaaagaactaatagacacatcatttgagcaaattgcaatccacaaatttctgaatttttttcatttattcctctcctagtacaaacaagaaaaaaggtcatatactaatcttttgagaattttgaattaattatgaagattacgaaatattgaacactttaaggaaattttggtaatattgatgaaaaacagtgaaggttataacaatttatttcacaagcatctagggtcactaagtgcgtgtgaaagcaagcaattcaagctgttgctaggtaacaagttgcaattgttttttgttggggagaatgacatcaaaaggttatgaagtagctgaccgtttcagaagttaattagtcatgcgtagccaaaagtaatcaactaatcaagagatttagtacactcaagagtgtaaatattttttacactatcaactaatcaatggtttacatttcaacgtgatatgaaaatggtaatatataggtagtatttgagttaagctcatgaaagccaaattagaagccctgcaactgcaaccaaactttctaacaatctcttcccgatataacattcatctgtcccttctaggaacttccttcaactgaatgtaaaaacataagttgttatatgacaactaacaagactgatagatcattcattgcataggaaatggaaacataacactgtagtgtagtgttctttaagaaaaaggaaggcttaattagaaattgaacgtgccagaacactgagagattatcaggtgttttgcaaagagaagggagaccaacagcaattgtcatgttaatctttaagccaaggtcaggatcatccctgtctttgagaataaggcagacacacttcttgttggtcttcatggcttgtgtgagacaactgcaacaatctgctgtgggtgctttcgcgtcagcacccaaatatggcagacacgttgcaacacctgtcagggattctgcacatttctgtttgtctttagctgaatctcccattgcatgactaaccaataccaatgttattgctaacactagcaagtgtggtagacaagcatttgaatccatttttcaatcttgatgaatgaatgagtggagatagattatattatagtctatagaaaaagttgtaggtagaaattgttaggttgtggtgctacatgtaaaatattaatttttttgtggataaacatataattttcttttcttaaagtacattttcctactccaaaagtgttaaatcctctcatgttattgtacccctagtagttatttgtttctgaccgagtctctttagtgtccaatttgctgatgtgaagggtagaaggacccaatgacaatgttgtcatcaaatttgaaaagaaataactataaaaaaacaaaaaaaaaatagaccaaaacactattaaacactaaatgaaattaaatatatttttattcttaataaatactcaaattttgtatttttttttaataaattgttattttacattgagttcctaataaattaacactaaatgaaattaaatattgatattattgttgttcttctacctccaacgttggttggctcgatatatgtgtgtgcttattttaacgttattagatgctacttgtttatttcgtacgttattgttgtctgaagcatagacacgttgtggaattccttagaaattgttaggagtggtgtgtgagaattccctcggcctgaggcatacgcatggttgaggacgcaacaaaattaacacattgtcatttcgtcgcatggttgagttatgatatttagacatttaggtttattgtttaaattaaggctatagtatatcaaaatcttgcccataacttagtatttctatctttttacggctattttgacaatatgactcttttttttttcaggactgtgtgatttaggctcattcaatttagaaacactacatgattatacagagacttgcttataatattaagataattgtatatttaattaaatgaatttgataatataaagatgatcgtgaaaagtttacgaaagatagtgtgcgtgagcaagaggaatatgttagctatttaggtgtaacttattggaaagtaagacatagtcatgtagatgtggtaggtttaacccttgctgccaaagtcaaaaattaagtgggaaaaaaaaagatagaaaccctcagggtagcttatagttaggagggctcaatatgtctcccttgaccaaacaatttttataaaatcataatatttttgtgtataaaatttactttaaaatacatttagtaaaacattttagttttagctttataattttaaaaacctaagacttaatatatgagaaaaatttgctgaataaaatatgagatcagctgaattttttattttgataaattttaaaataaaaataatatattagaaaagtgtgttaacatttctcttgaaatgattagtgtttttgctagcctatgttcctaaccgcaacaggcgccgaaattgtgggttaaccaggcatagagaaattccaaaagttgtgagttataagaagtctttgaaaatcacatgtccttaaaaaaaatccaaataaactgaaacaatgtttgactgatctatttcctatcttcaaagttaaaggcaagtctctggagaagatgacttcgataaagacacaataaaactgcttctggtgaagagggaatttcaagacattagttcttccccaaaagcaacttaactctaatgagaatgtgaaaactgaacaagaggatatatagtctaaaaccaactaacattccaaaattcctcaccaaccatccctattatattagacaaccacacccgtgatgaaaattatagtgcgatctcattccactgtctcaattaaataaaaaatatacaaaatatcacaataaggatatgttaattaagaatttaatttaaatacactttcatttgcaattaattaattatatatatttcctataacttttttagtaattgttttacaaatcatttggtgattactaattaattaacaatttaaatttttacactatctatcaaaattaaactcatatattaacagcatcaaagttattttcgttttaattttgatacttttgttctaattaaatagtactagcagttgccattctcattattttattatacgtacattctacattctgcttacaacttgcaatgaatggaaaaagtggagcttggacatcatttgtctgcatgacattaacaccactaacaaaaagtgagtggaaatttttagacaaaatagatgaagaattattaatgttcaaccatcattggaagtggaaagttcattatgagaaagaaaagcagttcgccaaaatggaaagcagtataggtaaagaaagctcaagtaattttcaacttctagacattccatgtagagataagaaatgacagttcatagaaaagaaaaggaaaaaaaaaatgatggcttaaagatctttatctttgagctgtttgtctctactaatcaactatagttagctattttaatttatgattgtcaacttgagataccattaagataaaagtggtgtgaaaaaagagcatcaaagtaggcgtacgtatggcgtcgatcaagagtttcatcacttgttctgtgagggaaacaaaaaacattacaagttcaaaattaaaaaaaatagaattcccttaataaaacacatatataatttttttctcaattctcataagaaaaaaccccttgcactaatgggttggtacaagggtccttgtggcagccatcatgcacaacaatgcaaattccctgacttgctaaaaaaggctaggaaggaattcgtaaaaaccactgaatcaaattcttttgtaacatttggaaatatgtgagtgagattttcaaaacaccaaacagttatagtatcaaatgttgtatcttcaaatgttgtctggagcaattccatctgaaatttccaagctatctgctttgcggtttttgaacttgtctagacgagcttcaaattctgttttgtatttatgacgcattattgtcttctactatctgtgcactaacaatgacttaacaaacaccccatgtaattgttggggttaaatcaatgaaaaaattgttggggtttaatttcaatgaagtttctatcacctaataactacacattcatatttaataaaggttatattatcataaatccatcatattatcttcattttaattcctagtgaagagacctaaattccttgattacactatcaatcccttaaattaatataactaaatgattttcattaagataaagtgtttattgatgctcaattctttttatcttattcctagacataaaaattattaggtgttttttgcaattcgtagttcaaagaaattttttaattacaattgaataaaaaaatcatacaaacaggtgattaagccaaaaacacatattaaacatagaagagaaacaattagaatgctttattcaataaaaaaaataatcattacatgaaaaatgaaccaattatattcaactccaacaaaagagaagattagttcatgacaataaaaaagcataaaagacatatatcacataaatatcctaaaatgacaccaaaatctaagaatgcatgataattatctatcatccaaacttaactcaggataaaaaaaaagtagcacattaaaattttatagggatagaaatgatatattttaccctattttttttcatgcttgacttaactctcaatatttgttgtcaatgataagaaactttggcatagatttgatggagtggcctatggttcaagttgaaaaagtggggaccttgatatgaatttggtggagttgtctgtggtttgtctagaagacaatttttttttcttttcttttattttgaatactaaaaatttgatcatttaaaattagttataggttcaaattgcatgtaatagaagacctgaatttaataatgcaagacttttttgttgtttatttggcacaagaataaattatatttttttgtagattatttaagtgatctcatgaattattttttaaaaatattatattgaacgtgagtatttttatgattgcttaaatttggcacttaaaattatttaaaaagtaaaatggaaattaaaattatgttgctcctattagtatttaagttgataacttgtaaagaaaataaaaaatatgatactaatttttatgataaaaaattaagattcattttcaaattaattagaaatagacaattaacacaacaaatatttccaaataatgataatatataaactgaaaagcttaagcattaagaatgcaaatcttcataagttagatatttcaataaattatatatttatttttctcttctatcactattcttaaaatatcaccacacaagtaaatgaaattcagacaaagactttaatatatgaagacttgtggtctaacaataaaatagctaaggccatagataaataatttaaaaaaacatgccacacttcttggtatatcatatcctctaatttactttttaagctaaatattatctacaatatatggaaaaatttgaaccaagacttataaaaggaaaaagtaatgatctcaataattatgatagaccaagttaaacaagcattttacacttctttgtatcttactaattaatttttaatgaaaaagaatataatattcaggctaaaatacaattagaaatagacgacaaacaatctttccgattaatgacaatgaaaattagcctttttcacatataagaagaatattattttgtaaattaaaaaatagatcaaaattaaatagttagattgaaacgaaagagtctttttttatctagattttttaaccgaaataatctttaaattagatcattttcctataattgatgtattcattatttataatttttttccttgcttacttaattctaaacatttgttgtcaatgataaggaacttgatatgaaggtaatatagtgacctatggttcatgttgaagaagatagagacctaaatatggttggctggactttgtggagtgtcctaaggttcaagatgaaaaaatgaaggacattgacttggacttgatggagtagtctatggttcaagttggaaaagtggggtccttgatatgaatttggtggagtgggaagtggtttgtctaggagactagacaattttgttttcatttcctttatttggaataataaaaaattgatattttaaaattaattatgggttcaaactgcaagtaatagaatatttgaattttataaggcaagacattttgttatttacttaacacgtacaggtttaatgaaaggattaattaatttaaataatagttaaaattttaagaataattaagccgaatttaattacctttgctataaactactcaaagttttaaaaaaattattaatattttcttaaaataaaaatttcattgatttaagaaatcctatactgtaaattaaaataaaatgtttcttattttagtatttgagacaagaataaaatatatttctttgtagaagattgtttaagttatcgtataaatatattttttagaatattatattgaacgtgagtatttttatgattgtttaaatttggcacttacaattatttaagaagtaaaatgaaaataaaaattatgtttctcctatttaaaaagtacaatgaaaataaaaattatgtttctactattatttaagttgataacttataaaaaaatacaaaatatgatactattttttatagaaaaaagttaaattctttttcaccacttctttttatatcaataattaatttttatatgataaagaaaatcatatttagatttgaatacaattagaaatagatgacacaaacaaccttttcaattgatgacaattaaatttagtcttttttttcatatataagagaatattattttgtgaattaaaaaattgatcaaaattaaatagttggattggaattaaatactctttcttttatatagatttttttaaccgagatagtctttaaagtacacccttttcctataattattgatgtaaattatcttacataatatccttccaaataaaaagctttccctccaatcacccactaaaatactctaccaaaaacatccggcctatactcaccttcgtgtctttggatgtctttgctatcctctcatcccttcatcatctaggaataagttacaagctcggtccacaccttgtgtcttcttaggatatccctcaaatcatagaggatacaaatgctatgatttatctagccgtaaaatatttatttcccggcatgtcatttttgatgaaactaagtttccattttctaatctaaatgtccctacaacggttggctataattttctggatgacgacacacccttccttccatcctattcctatagtgctccaccctctaaccatcaaaatcgtactccacccctaactacaccagttcaaacaaacatttatcaaccatcaccatcttcttttaattcgcctctgtcaccctcccacaatcacacctcaccaaccacagcatcagccccacccataacatcacctccaaacccatcattaccaactatcatatcatccccatcccccacatcacttccgactcctccaccttcacaacaaaaaccgcccctctcccctcaaatgacaaccagagcccaacacggtattgtcaaacctcgcaaactcttcaatctccatacatcaacctcaacctccatatcccctctacctacaaatcccattgatgcattaaatgatcaaaattggaaaatggccatgaaagacgaatatgatgctcttattgaaaataagacgtgggacttagttcctcgtccgtctaatgctaatgttattcggagtttgtggattttcaggcataaaaagaaatctgacggatcctttgaaagatacaaagctcgccttgtaggtaatggtgcaaatcaacaaacgggtgttgattgtggtgacacattcagcccggtggtcaaaccggctaccattcgaacggttctaagtgttgccttatcaaaatcatggtgtcttcatcaattagatgttaaaaatgctttcttgcatgggaaccttcatgaaacagtatacatgcatcaacctcctggatttcgtaattctcaatttcctgatcatgtctgtttattgaagaaatcactatatggtctcaaacaagcacctcgcgcctggtaccagcgctttactgattatgtagctacaataggtttctctcacagtatttcagaccactctctttttatatatcatcatggcaataacatagcttatattcttctgtatgtggatgacattattcttgctgcatcatctgacactcttagagaatctattatggcacaactgagttctgaattctccatgaaggatctggggcctctaagttattttctgggtatttctgtcaccagacatcccgaaggcctttttctttctcaaaagaaatatgcagaagaaattatcgaacgagcaggtatgtcttcctgcaaaccatcctccacaccagtagacacaaaggcgaaacttagtggttcatccggtaacccttaccatgatccaaccgaatatcgtagccttgccggagcattgcaatacttgacgttcactcgaccggacatctcatatgcagtccagcaggtgtgtttatttatgcatgatccaaaaactcaacacatgtctgccttgaaacgcattattcgatacattaatggtaccatagatttcggcctccatctgtacccttcatccatcgacaagctcatttcttacacagacgcagattgggccggttgtccagacacaagaagatctacctccggctactgcgtttatctcggtgacaacttgatctcatggtccgcaaaacgccaacataccttgtctcgttcaagtgctgaagccgaatacagaggtgtcgctaatgttgtgtctgaatcatgttggttacgcaacttactcttggaactatgttgtcctgtcacaaaagctactctagtatattgtgacaacatcagcgcagtttatctttccgacaatcctgttcaacatcaacgcaccaaacatattgaaatggatatacatttcgtgcgtgagaaggttgcttgcggtcaagtacgcgttcttcacattccctcgcgttttcagattgctgacatcttcacaaagggacttccgttgcaactctttgatgactttcgtgatagtctcaacattcgttcacctccagtttcgactacgggggtgtattagatatgtaaatatagaaacattattattagtattaactacaatgattattagaatcataaccaatgatttattagatatgtaaatatagaaacattattattagtattaactacaatgattattagaatcataaccaatgattattagaatcataaccacataattgtattgtgcatataaaagactatcagatcaatggaaaaggcacggcctaaattatcttacatattcatcagctatattttttttccttgcttgacttaactcacaacatttgttgtcaatgacagggaacttgatatgaaggtaatgtagtgacctatggtacctatggttcaagttgaagaagtcagaccatgacatggctggactttgtggagtgtccaaaggttcaagatgaacaaatggaaaaccttgagatggacttgatggtgtgagctatggtttagaagacaattttcttttgcattatttttaattggaatattgaaaaattgataatttaatatttattatgggttgggatatgatgaagtagaagacttgatttttttttaaatgttggacttttgtacataacaaaagtttaacgaaagattgattaaataatggttaaaatttgaagtttaatgacaccaaattttcatttaatcagttctaaagggtaaattaaaataaaataatggttagcaaagtaattttttgtcacatggtaatccaaagctagttccatttgccaaaagaggttcaattaaagatcgactgttcccaaatagaagagttttcttgtacgccacaaaattttggtacatgattagagtgtgatcttttagggcaaaaagtgataaaagtgataaaagttaaatgccacataaatccttgattcgatttggtttgactttcatgtacatgttactaagaaataaataaaaaattaataaatattttatatgtaaatatataagagatatatgatacataatagtttgtagtaatagtacttgacttatattttcaaagacttctctatataaacaacattatataagatgcactttcattatttttggaaatgtctatttgtttttcacctaaaggaaaggaaaacatcatggaggaaatgttctctaaaatcaataatttgttcttcatatccttattttgaaacaaatcttttaaaatttgaagtggcagataaaaatatttcaatgtgatttttccttgcataccacttttttgtgttaagcaaaatttagattcgcatatagcatctccaatatcccaaatacctataaacaaatgtaaatgtagaacgatttagatttatttcttaattattgttaaaatataattgaaaaacataaaattatttgtaaatttaatatcctgaatttaatgcattcatgtgattctcaatgaattaatcgttacatcaacattgttctccaatgatattggatgttcgttttgccacaaatgatacgcgattgaagaaatatcagttattatcaaatgaaattaagtgcaataaatattagttgtcaagtatcaattataatacgaaattaatgattaaattgttaaatatttttatgataatgaatacggattttttttgataattagaatttaatacaattatttaaattaggcatcaattattcttaacggatacgaaaactaatgtccctatttgaattaaaaaagaatttgattcactaaaaacaacctatatgtaaatttttttgtataaaattaattttgatgtgtagctaaatataacattgaatgggaaaaaaatcacataatataacattgcatgtggaggaccttgacatagacttgatggagtagtctatggttcaagttggaaaagtggggaccttgatatggatttggtggagtggcaggtggtttctctaggagagaattttgttttcatttcttttattttgaataattaaaatttgatagtttaaaattaattatgggttcaaaccgcatgtaatagaatgtttgaattttataagacaagactttttgttgtttacttaacacgtacaggtttaacgaaaggattgatttgaataatagttaaaatttgaagactaattaagccaaatttaattatctttgatgtaaattacttaaagttttaaaaaaatcattaatattttcttaaaataaaaatttcattgatttaagcaattctatacggtaaactaaaataaaaaaatgtttcttgttttagtatttggcacaagaataaattatatttctttatagatggtttaagttatcgtatggattttttttagaatattatattgaacgtgagtattctcatgattatttaaatttggcacttgcaattatttaaaaagtaaaatggaaattaaaattatgtttctcctcttatttaagttgataacttgtaaaaaatataaaatatgatactgatttttttttttgagaaaaaaagttaatattctttttacttcttttatataactaattaatttttatatgataaataaaataatattcaagttagaatacaattataaatacatgacacaataacttttccaattgatgataattaaatctagtctttttttcctatataagagaatattattttgtgaactgaaaaattgattaaaattaaataattagattggaaggaaataattttttaatagaaatagtctttaaagtacaccctttttctataattgatgtattcatcaattaattgagttagatatttcaataaattgaatatttatttttgtcttctatcactattcttaaactatcaccataaataaaatttagacaaaaactttaatatatgaaaacttgtggtctaacaataaatagctaggaccataattttataatttaaaaaacatgtcacacttctttgtagatcttctaatttactttttaagttaaatatgatttacaatacatggagaaatttggaccaagacttataaaagaaaaaactatgatctcaataattatgatagatcaagttaaacttctttgtatctcactaattaatttttaataaaaagaaaataatatatgattaaaaaaacaattagaaatagacaacacaacaatcattaatgacaatgaagattaattagtctttttcacatataagaagaatattattttgtgaattgaaaaattgatcaaaattaaatagctagcttggaatgaaataattttttttatagatttttttaaccaaaatagtctttaaagtaaactcttttcctataattgatttattcatcaataatatttttttttccttgcttgacttaactcgcaacatttgttgtcaatgacagggaacttgatatgaaggtaatgcagtgacctatggttcaagttgaagaagtcagaccttaacatcatggctggactttgtggagtttccaaaggttcaagatgaaaaaatggaaaaccttgagattgacttgatggtgtaagctatgatttagaagacaattttcttttacattatttttagtttgaatattgaaaatttgataatttaatattaaatttgatgaaataaaagacttgatttttttcttaaaaaaatgttggacttttgtacgtaacaaaagtttaaccgaaggattgattaaataatagttaaaatttgaagtttaatgacaccaaattttcatttaagcagtattatagagtaaattaaaataaaataattcttatttatttttgtaaaaaaaaactgtacctaaaagaatttagtgtatataggaattttaaaaagggagatagatacagtaaatacaaaaaaaatcgtattctaagaattaattcgggagaattggataattaaatcgataatttaaagaggccagcgtaaaaaaagaatggaagaatattttagtatttggcacaataataaaaaaggtaaaaaataatgaaagtggagaaaaaaacaggcagggcagcagtataaataatagaagttttatgatttatatgcagaaccaagaagcacttatacaattaagctatatttgcgttgcatgatcatgaattcctcctccatttatattcttgtctttgtccagctttggttgttgagcttaccatgcagagagagtgtgtgcatcccaagtgagcgtgagacacttttgaagtttaagaataatctcatagatccttccaataggctttggtcttggaatcataataataccaactgttgccactggtatggagtcctctgccacaaccttacttcccatcttcttcagcttcacctcaactcttcagattctattttcaatgatgattgggaagcttataggagatggagctttggtggagagataagtccttgtttggctgatttaaagcatttgaattacttggacttgagcgccaatgaataccttggagaaggtatgtcaattccttctttccttgggacaatgacttccttgactcacctcaacctctctcatactggattcatggggaagattcctcctcagattgggaatctctcaaatttggtgtatcttgacctgagagctgttgccgacggagcagtaccctctcagatcgggaatctctctaagcttcaatatcttgacttgagcggcaattatttccttggagaaggtatggcaattccttctttccttgggacaatgacttccttgactcacctcgacctctcttatactggattctatgggaagattcctcctcagattgggaatctctccaatttgctctatctcggccttggaggtcattctagtcttgaacctctgtttgttgaaaatgtagaatgggtatcaagtatgtggaagcttgaatatcttgatttgagttatgcaaacctatccaaagcatttcattggctacacactctccaatctcttccttctttgacccacctatatttttctgaatgcacactccctcactataatgaaccatccttgctcaacttctcatctctgcaatctctcattctttacaatactagttattcccctgccatttcttttgtccccaagtggatattcaaattgaagaaacttgtttctcttcaattagtgcgtaatggcatccaaggtccgattcctggtggtattcgaaacctcacacttcttcaaaatcttgacttgtctgaaaattcattctcatcttctatacctgattgcttatacggtcttcatcgtctcaagttcctgaacctaatggacaacaacttacatgggactatttctgatgccctgggaaatttgacttctcttgttgaacttgatttgtcatataatcaacttgaaggaacaattccgacttttttgggaaatctccgcaactcaagggagatagatttaacatttctcgatctctctattaataaattcagtggaaatccatttgaaagtcttggatcactctctaaattgtcagttcttcatattaattacaataattttcaaggagttgtcaacgaagatgatcttgcaaatcttacaagtttgaaggcgtttgatgcatcagggaacaatttcactttaaaagtgggtcccaattggcttcctaatttccagcttttctttttggatgtgacatcatggcatataggtcccaactttccatcgtggattcagtcacaaaacaaacttcaatatgttggactgtctaacacagggattttagattctattcccacttggttctgggaagcacattctcaggtttcgtatttaaacctctctcataatcatatccatggtgagcttgtgactacaataaaaaatccaatatctatccaaactgttgatctaagcacaaatcacttatgtggtaaattaccctatctttcaagtgatgtgtatgggttagacctttcaaccaattcattctctgaatccatgcaagattttttatgtaacaatcaggacaagccaatgcaattagaatttctcaatcttgcatcaaataatctgtcaggagaaatacctgattgttggattaattggccatttctagtggaagtgaatttacaaagcaaccattttgttgggaacttccccccatccatgggttccttggctgagctgcagtcattagaaattcgtaacaactggctctcgggaatatttcctaccagtttgaagaagactggccaattgatatccttggatcttggagaaaataatctttcaggatgtattccaacatgggttggagaaaagctctcaaatatgaaaatcctccgccttcgatcaaacagtttttccggtcacattccaaatgaaatatgtcagatgagtcgtcttcaggttttagaccttgcaaaaaataatttgtctggcaatatacccagctgtttccgtaacttgagtgccatgacactagtgaaccggagtacatatccccaaatctattcttatgcaccaaataatacagaacactcttcggtatcaggtatagttagtgtgctactttggctaaaaggaagaggagatgagtatggaaacattctgggtttggtaacaagtattgatctgtcaagtaacaaattattaggagaaattcctagagaaatcacagatctaaatggattgaactttttgaacttgtcccacaaccaattgattggtcctattccagaaggtattggtaatatgggatcgttacaaaccattgatttttcgaggaatcaaatttctggtgaaatccctccaaccatttcaaaattgagctttttgagcatgctagacgtgtcttataatcatttgaagggaaaaattccaacaggaactcaattgcaaacctttgatgcctccagctttattggcaacaatctatgtggtccaccactgcccataaactgcagctccaatgggaaaactcatagttatgaaggaagtcatgggcatggagtgaattggttttttgttagtgcgacaattggatttgttgtgggactttggatagtgattgctcctttgcttatttgtagatcatggcggcatgtctattttcatttccttgatcatgtgtggttcaaacttcaatctttttcctcatatagtatcactgtttagttttgcttacaaccgatgttgtatcattgtattgccaggttgttcaatttgcattgtagttattgctatcttcttttttttttttttttttttttaaatttgagagtcttatttaaattctgttttgggatgtacatatttgcatattgagcatatttgtagttaagatcaactagttgttcaattctgtgtatcacattcttgtttccaaaaatgggggactagtggttcaagaaaacgtggtttaataggaaaaagacttatatttaattttagtcactaaccattgaagtgaataattagttctttcgtgttaattaaagtcgtgactcgtggctgcatacaagacttgactctccaagccggcaaggccaagaactttgatgagatatccatagataaccaatgatgcttgagaacaaacaaaattgttggagtaatattctaaattaccctaactataaaaagggcaaataataggtgtaactttttaagtattattcgttttgctttttcaagttttactttatataataataaatgtcagcttttaaaattaattatcaaattgaaatgttaactttacttaaaaattaacacaaaaaatactaaagaatttatctttataaaacaatttttttgaagagtcaaaatgaattaatattcaagtgttccaggatcagtattaattacaaccaaaactaacggaatatgaagcctgaaacagaaaagtgataacaaaatcgcaggaagtatcttggctaattttttatttgataaatatataaatttttggaattcatttttgtaaaaatttaataaattttttatctttacaaaattaaaatacattattattatttggtctgaatgtagattcaggtaaatttaaattatgagtttttatattgattgtacgcagccttaccattgcatatgcaaagaggctgtttccggattcaaacccataaccaacaagtcactaaggcacaacttttatcactgcaccagggctcgccctcaattatacatatatataatcgatgtaaatatattatttttatattaattatacatataataaaaaatgtaataaataatttggaatgtttaaatgttacttcaagaaaaaaataaaatattttatttttttgagaacgaaaaatatattgaaattttatccagataacttttcaatattttaatatttataagattaaaaatatattttaaccttataaaaatatcaacaaataaacaaaatgtcttttgtttaacagttttaagaattaaataattgatagtaatcataatttttaaaaattaattaacgtattatacaaaatgttgagctaacgatcaattaagggtatttttgaatgatcatggcccaagcattctttgacaaggtcagctaccgatatcgcatcaacatttactcacttcttccattaaaaggaactggaggctgaaagtcgtaatcttcatttttatactttttagattatacaaagttggaaatattaaaacattatgtggtgggcgaattagtgaacaaaaattataagatctgcacaggttattctaatttaattctaatcaagaaattaattattttccattttactccctttatgacaaatttaatttttacttataagccggtctctgataaaccttgtaccatattttaaagcaaaccgtaacacatcataaaacttagtgatataattttagatgtctttgtgtgtgtgagatgtattgttaaatttatagcatccttcctcataaaatttagggatataaaataatttgatttgccttttatgtgtgtgtgcgtgatgtaatgttaatgtttacgaccaagctaaaagtacaacaaaaataatttttatctaaaggttttcttgtaataaatataatggccgggtgaaattagccataatcaaattctactttttttatttcctttttatatagagtgccatatataacaggaaactgaatttgtcggttttcacactagacaaacagcgccaagaatgagaatgaacataatttgtgggtcatgttgaaatttatagctctgaacaaagagtagtccaatttcacattgaatgcgaaatgcatgttggatgatgagctattgcaatcttccaatggaacccaccaaagataggtggcattagcacaaaacatctcagcaacataaaatgctacaaaataaaataaaatatttttaaactatgacatactttgtacattggcatagctacagtcccaatcaaaaccatccccttcatggtcatcatcatcgtcatcgaagggtgggtctaaaacagatactggactgcactgttccttatcttcctcttcttcccctgattggaatttgttgacgccatcagcaccattaatttctttgtcctataaaaaaaattcacaaccaccatagttagaatattgtcctaattggggtagttaacacaagtccctgatcattcttataatgcccatggatttagactctacacttgcttcataattgggtggttgttgttgttgacttgtttttttttttggttttggttacttcccacacgaattaattaatgtgaacaaaaaatacaaaggagaaactatttttctagaaatcgaatgtcggggtccaataattccaatagaacaaacaaaaacacgattgtcttttttaaaataaaaaaaaagaaaaggaattcatttaccgagtaaccccaaaaagtaaaattgtaatagacagtaaaggttaaaacatacacaataatcaataaattgtttgttaaatgtgataaaaaccatttcagaaagaagtaaaaaatcaacttagtgcaattttttttgaacatgtttgtatttcgaaattatattttaaaacggaaaattgaaaattgacaatcacccctaaggcgaccttaatttttaaataagtaaaaagtattgtatgtgtggtgcacagggcagagattaatataaagccatggcatattttgttgggagggttgaaagaaggcactacggggataccatggctgaacagagagccttatgcttactggaaaggtaatccagctgttgctcaaaccagacaagatctcaagaaatgcaatgtttatgaaaatcaagattggaatgctcgtttatttgcccaggtaccacacttcttattagctttgtttgattacacttattgaaagtagttttattatttggatatgaaaaaattaattttgtatgtaatatttcttataagcaaaagtttcattatataaaattggcttaagcacatggtgtgcagaaacaagaaataacaggcaaattcaacgaacacaatggccagcagcaatattgtatataacattatacacttttttaacttttaatcttttattaatacacaacttaaaagtacattcaaaatcaaaggaaataacctgttattgaacattactgattttttccttccgaacaatatattttgtctgttaattgactcacaataaagccacatatatagcttccttcttgacaaatgaaaattttgcttcaggattggtttcgagaatcacaagaggggttcaacaaatcagacttgccaagtcaatgcacttataggtataacattaaaactgtccattcatgcttcagttgtaattatatgtaataatatatttttgttattggatatataagttcagtttatcaataaataaatgtttcaattcaatcatgatcgtgcagatataaggtgtacattgaaggttctgtttggtcagtcagtcaaaaatacattctgtcatgtgactctaccactctacgtgtacgactacatgtttcatctcctgaattcatatgctaaactcttcagatacaaaccctccataagtgctaatgctacagaactatgtgtggagtcaatggtttgtggagcagaaggatcagtaaagaaatttatgatggaatcattggtcaaggttcctgcaaataccgacccttgcaccatgcctgccccttttgaccctccaactttgtatgcaacattagagagaaaggaaagctcaattcaacaagttgaatcatgggagaaaagttattgggataatcaaaccataacatcttaatgaatatttgtttttccatattcaacttaactcattcattcttagactatcttggaaggatacaagtagaatctagattatcttgtacttggctaaagaaaccatatcatgcttgacgaattatctgttttagactttacgaggaaaaaaaaattagtttgttaattttgtaaatatggataccaaaatgtaaaatttgatatcaattaagttaactaatgaatcaaatttgtaaaatttgaaaatatggaaacgaaccgagcaattgaaaagtgggataccaaaatcatcctcaagtgtacctaaaaaaataacaagattttaatttctattacaacaagtcgttatttcttattagagataaaagaattttaggactgaacaataagatttgtgtaacaagcatttagttgtatgagattaaaggcaaaatgctcacaaaaataaatctccaataaggttttgcaataatatctattgtgagtctgtcagagatttaatacactcgagtgtaaatatctttacactatcaactaatcaatggtttacgtttcaacgtgatatgagaatggtattatataggtagtatttgagttaagctcatgaaagccaaattagaagccctgcaactgcaaccaaactttctaacaatctcttcccgatataagacgcactattcttcttagctgtggccgtttcatctgtcccctggtttctaccattctgggaaattccttcagctgaatgcacaaaagaacacattaaaagtaaatgcaaaatttagtactacaccattgaaactcaaatgtcaatgtcaaaaataaattctaaaaatgaaatattttgttgaaaggatcactaccagaagtagtgggcgaaggactgatagaaccaccattggatttctgaccaatttgattaaaagcttgagcttcaggtgatttaggatccaagtgcagaagtgctgttcaaatcgtttcaaacaagaatttcttgagaaaaaatcaaacctcaaatatttttaactttcgcagttgaaaactcagagataacagatacacaaacaaagtaaaattggcagatttagctgccctttttatcccctttaaaatgtgttattgtctagttatgaatgagaaaagtagaaaagtttgaagtacatgacttgttgaccattcattacatagtaaatggaatgtaacactcttttgttctttaaggaaaatgaaaggcttgataatgataaaacttagaccacaaatattctgatttttttagaaatatactaaaattggaagatttagggcctgagtattctcagttaagaaactgttttataaaataagtttagactacttagtaatcaatttcttatccaaaatatataagtttggagaatccaatccaaaataagtgttctaaaatccaaaaaaacaaaaacaacgggaaattgttttctcagcttcttctgttttaatcttattcaagttccctctcaatttcacattctgtgtctcacatcattctccgccaaacagtctgaagaactgatagcagaggctatctgctaagagcaaaacgaaggaaataaagagaagataagcaaattcaaattctgttctgtgctttttcatttcttttctcttgatatttataggcttacactgcttattgttttctagcagataataacaaactctgttataacagaatttgaggataacagaatttggataggaaatggaaacataacactgtagtgtagtgttcttcaagaaaaaaggaagacttaatttgaaattgaacatacccgagcactgtgagagattatcaggagttttgcaaagagaagggagaccaacagcaattgtcatgttaatcttcaagccaagatcaggatcatccctgtctttgagaataaggcagacacacttcttgttggtcttcatggcttgtgtgagaccactgcaacaatctactgtgggtgctttcgtgtcagcacccaaatatggcagacacgttgcaacaccagtcagggattctgcacactaataaattctgtggtttcattgtgaactcactgaagaagaccagtttgttgacttagtctggatcatttcaattttgtttctgttaaaaaaacactaaatgaaattaaatatgtttttaataaatttttattttatattgaatttctaataaattaatatttttattttttatcattgattttttattttagtctatgataaattaaaaaaaattgtttactttctagtaaattttattttaatatgtattaataataaatgaaaaatatttataatgaagaaaaaaaaataatttattagggactaaaaataagtgtttaatataaaaaataaaattatcattttattaaaaatttatcataaattaaaaatttattaaatatatatatataatcagatatttattaaaaataaaaaaatatatttaagccccttaaataattaagcagtacatgtgtgggatagtagacttccttcttgtgaacaggacctgatcctgagtgtatttttcatatttgtcgaagcaaaaaaaccaaataaagtgaaacaatgtttgacttcctatcttcaaagttaaaagttaagtctctggagaagatggcttcgataaagacacaataaaactgcctctggagaagagggaatttcaagacatttgttcttccctaaaagcaacttaactctaatgaaaatgttaacactgaacaagaggctatagtcgaaaaccaactaacattccaaaattcctcactaaccatccgtattatatttgacagccacacccgtgatgaaaattatagtgtggtctcattccactgtctcaataaataaaaaatatacaaaaaatcacaataaggatatgttaattaagaatttaatttaaatacacttagaattgcaattaactatatatattctcctataactttttttagtaattgttttacaaatcattaggtgatatctaattaattaacaatttaaatttttacactgtctatctaaattaaactcatgtattaacatcatcaaagttattttcgttttagttttgatagttttttttctaattaagtactactagtagttgccattctcattattttattatacgtacattctaattaacttgagataccattaagataaaagtggtgtgaaaaaaagagcatcaaagtaggcgtacgtatggcgtcaagagtttcatcacttgttctgtgagggaaacaaaaaacattataagttcaaaattcaaagcaaaagaattccttttataaaacacatcatttgtttctcaattctcctaagaaaaaaaccacttgcactaatgggttggtacaagggtccttgtggcagccatcatgcacaacaatgcaaattccctgacttggtaataaaggctaggaaggaattcgtaataaccactgaatcaaagtcttctgtaacatttggaaatatgtgagtgagattttcaaaacaccaaacagttatagtatcaaatgttgtatcttcaaatttggtttttttccgttaggcctagatttcttcttggtatcagaatgtatcctagatccattcaaaagaattacgcatcatgccgaaagagtgctagacgtgaggggtgaattaaaaaaaataaaaatccaagtcccatattggttagagatagtctcaagatagaatttataaggtgaggacaaccctcacctgagctagcttttagggttgagttaggctcaaattttttctctttctacccaaatagagttgcaaaaatggaagattgagagcttaattagatagaattcaaagttgcaaattccaaacctgtttttacaaaaaaaaaaggtttaattatccttttgacccttaaagttacgacaatatttctttttagttcttatagtttaaatcattctattttagtcccggttgaattattttttttactctttgattctcaccatcaagtttcgactaaagtcaattgttgaaactaatgttatggagagggcaaagacactctcctatgcacacacgagacatggctgattatcttttctctcaacaacaaaccggcacctgcaacatcatcccaaccatgaaggcacaaactaccacacctctgttactcatggaaccagaaactcacaatcacacactttatctgcagcaatcaaaaccatcatcccattggaacgatcaacttagttcaatgctgtgataccactccaacttgatgagacacagtaaagaaggagattacatcatggcaattggcaaatgctaagctttcagaggtcggtggcagactcaagaataatggaatgtgtagtgcctttgtctcatacctccattacacttcagttgtacctgagcttgcttccctatttttattaattttcttcatgtttatgtgtgagttgaatcttccccgcgaggacaaaaaggtaaaaaaaatataaatataagaaccaaaatgaatatcttaaattatagggactaaaaaaaattatcacaactataaggattaaaagagtaattaaatcaaaataaaataaactagtgcaaaataatggtggtgtggttagacacttttaatcctaaatgtctcgttgttgacatatatacttctacatatgtgtgcattttgcaaccaccaccattagtggagtaaaattttaaatgctaacccttctacggtatatatcctacataggcattgttagtagtaaataccaaccgtgaaccagaaaattgtggattcaacctttttcgtcttccttcttcttcatggcagtgctatttgcaactcatgttcttctcttgatattgtccactgcaacaactctccacttcagtgcaagcaaggcagcaaggctcaatatgacttgcagtgagaaggaaaggaatgcactcctcagcttcaagcatggactagcagacccttcaaacaggctttcatcatgtcggattgctgtacatggccaggggttcactgcaacaacactggtcaagtcatggaaatcaatcttgacacacctgtgggctctccctatagggagttgagtggagagattagtccttctttgcttggactaaaatatttgaatcatttggacttgagttcaaattattttgttcttactccaacaccaagcttcctaggctcattggagagtctgagatacttggaccttagcttaagtgggttcatgggattaatccctcatcaactaggaaacctctcaaacctagcaccttaatcttggatacaattatgctcttcagatagataaccttaattggatatcaaggctatcttccttggagtaccttgatttgagtggttcagaccttcataaacaaggtaactggcttcaagtactgagtgcacttccatctctttcagaactacacttggagagctgccaaattgataacttaggaccaccaaaaggaaaaaccaacttcacacatctccaagtccttgatctttcaaataacaatctcaatcagcaaatcccttcatggctatttaatctcagcaaaactcttgtccaacttgatttacacagtaaccttttacagggtgaaattccacaaataatatcaagcctacagaacataaaaaacctagacctgcagaacaatcaactcagtgggccacttccagattcattaggccagctaaagcatcttaaagttctagatctcagtaataatacctttacttgtccaattccctcaccatttgcaaacttgtcatccttgagaactttaaaccttgctcacaaccgactgaatggaaccattcctaagagttttgagttcctcaaaaacctgcaggtattaaatcttggagctaattctttgactggtgatgtgcctgtaactcttggaactctctcaaatttagtgacgttagacctttcatctaatttgttagaaggatctataaaagagtcaaattttgtaaaactttttacattaaaggaactacgtttgtcttggacaaacttgttcctcagtgtcaactctggatgggctcctccttttcagcttgaatatgttttactgagctcctttggaataggtcctaagtttccagaatggctaaaaaggcaaagttctgtgaaggttttgacaatgtctaaggcaggtattgcagacttggttccaagttggttttggaattggactttgcaaattgaattcctggatctgtcaaacaatctgttaagtggagacctatctaacatctttctaaattccagcgtcataattttgagttctaatttgttcaagggtagattgccaagtgtgtctgcaaatgttgaagtgctgaatgttgccaataactcaatttccggaacaatttctccctttttatgtggaaagccaaatgctactaataagttaagtgtgcttgatttttcaaataatgtcttgtctgatgatcttggtcactgttgggtgcattggcaagctttggtgcatgtgaacttgggcagtaacaatttgtctggtgaaattccaaactccatggggtatctgtctcaacttgagtctttgctgttagacgacaaccgcttctcaggatatattccttcaacactgcaaaattgctctacaatgaaattcatagacatgggaaataaccaactttctgacacaataccagattggatgtgggaaatgcaatatgatagaaatgtgattagtgaagtggggcctaggccaagggtgtggagagtttatactaggaaaaagacaaaaggaatgaaagatgatgacgtggctgtgaacgtatgagagtgactatagatagctattgctggaagggaataaggaagagggaattcagttaggacttggtggggtcacctctaggtgatttgggagcactgcgtgcttgggaattggttgttactaccagtttgttattctttctttctttctgctcttatcttcctgcaattgtgtatctcacagcaataccattgcagtttcattacttatattacactgttatatccattttatcactatttctgtgcattaagacccatcacaatatctaatggttcttcgtctaagatccaacaatttcaatggcagcattactcaaaatatgtgtcaactttcttgccttatagtgctggatcttggcaataaaagcctgtcaggatccattccaaattgtttggatgacatgaaaacaatggctggtgaagatgacttctttgcaaacccttcaagttattcatatggctctgacttcagttataaccactacaaggaaactcttgccttagttcccaaaaaagatgagttagagtacaaagacaatctgatattggtgagaatgattgatctttcaagtaataagctgtctggagcaattccatctgaaatttccaagctatctgctttgcggtttttgaacttgtctagaaatcatctgtctggagagataccaaatgacatgggaaaaatgaaattgttagaatcccttgatctctcactaaacaacatttcaggtcaaatccctcaaagcttatctgatttgtccttcctcagtttcctgaatctatcataccacaacttatcaggcagaattcccacgagcacccaacttcagagctttgaagaacttagctacactggaaatcctgagctttgtggtcctcctgtaacaaaaaattgcacaaacaaggaatggttgagggagagtgcttctgttggacacggtgatggtaatttctttggaacatcagagttttatatcggtatgggagttggatttgcagcaggattttggggtttttgcagtgttgttttcttcaacagaacttggaggcgtgcttattttcattatcttgaccacttgagagatctgatttatgtgatgatagtttgaaggtaagaaggttacttgggaaattatgagtttacctgttaactgttaagaagtgagacattacaacgtgttagtctagccattaaaaatgtgaaaaggtttaccatactatgtacctgttcatctgtggtgttctgtctgttttgctttcattggtattaaatgttcttaatgttaagagaactagacgagcttgagacttgagtatcaaattctgttttgtatttatgacgcattattgtcttctactatctgtgcactaacaatgattagcattaaaataactgaaatgacacactcggtgattggatttaagaagattgttttacacaacatgtaactaagaatttgcctgaatgaatttaattagtgtagaaagttggagcttgcataggattctgcagtttctaagctcttccacatcttccttctctcgcttttccttactctgatacattccacattcccatttcctgagtattgatgcatttattctataatactcattaacaagttcatttgacaaatcatgattgattaaattttaaaaatcatgaaatattacttttttcattcataatagttcctatcgttttatacaagggtcactagttgtattgaattccctcatacaaaataaagtttcaagctatcagatatagggtttccatcacacctgtatcaccagtgtgtgtattagagagagaggagctggtatctttattaaagaaatagggaaatatccaaaaagatggttttccatctgttcattttcttccactggccgatgtctagttcttcatccaccctatctattttcacatcggtttctctcactgtttcagttccgagatcataaatgtagggaaaaaaaatagaaaaaaagaatagcatatacactatatatgcatgtacaaaaaaaaaaaaaatacaaaacacttgtcaagtccttttgctcctcagacaatgaaaacagatttagaatgctctgataatttatatttactttaatttcacttttgatctccatgcattatgtaaattaggtattataattttgtaagcttaatttggtcccttagatgtggcttattcacttctgcttccttataactgcaatattctaagggatcaaaagtttagttcagtatgtgttaggcaacatggtagttgtcatattatctacctttcatctagtgtcatgccagcaaatatctgttaaatattcaaagaaagatggatgtagggattgaaattgcaatgcctagtggatccaatccaattctcccaattggaacttacaatagaccaaaatcgcacaattactgtacctgaaaaataaagaatgcaattaaacttttatattttttatctttgattttaatttcataaaaaaaatcttttcaaactcaaattcagtcaattataatagaaccatacaatagttttttttccagggaaaccacacaatagttttaaaaacatttatatgcagttttttaattaaaagtcaaatcagaattcaattaatgcattgaaatcaatttattaattactttcattctactaaaaacaccaatcttttttaaaaaatttattaacataaaaaatataatgcaattattgaattacaatagcgacaattagacttgtgttttattgaattgtttgattatatttttaatcactagatggacctagtgacaagggagtttgactaattcgcacaagggagttaaatatttcaataaattgtatatttatttttctcttctatcactattcttaaactatcaccacataagtaaatgaaatttagacaaaaactttaatatatgaagacttgtggtctaacaataaatagctaggaccataattttataatttaaaaaacatgccacacttcttaatttgtagatcttctaatttactttttaatacatgaagaaatttggaccaagacttattaaagaaaaaactatgatctcaataattatgatagaccaagttaaacaagcaatttacacttctttatatctcactaattaacttttaatggaaaagaaaataatattcatgttaaaatacgattagaaataaacgccacaacaatctttccaattaataacaatgaaaattagtctttttttacatataagaagaatattcttttgtgaattaaaaaataaatcaaaattaaataactaaatttgaacaaaataatcttttttatattgattttttaatctaaatagtctctaaattagattcttttcctataattgatgtattcatcatttataattttttccttccttacttaattttaaacatttgttgtcaatgataaaggacttgatatgaaggtaatgtagtgacctatggttcaagttgaagaagtggggggacattgtcatgaaattgatggagtggcctatgggatatggatcaaggtgaagaagtcagagaccttaatatggctggactttgtggagtgtcctaaggttcaagatgaaaaaaaggaggagcttgacatggacttgatggagtagcctatggttcaagttgaaaaagtggggaccttgatatggatttggtggagtagccagcgatttgtctaggagaaaattttgttttcattttttttaattttgaataataaaattttgatagtttaaaattaattatgggttcaaattccaagtaatagaatatttgaattttataatgcaagactttttgttatatacttagaggattgatttaaataatagttaaaatttgaagactaattaagctaaatttaattaccttagatgtaaactactcaaagttttaaaaagttgttaatattttcttaaaataaaactttcattgatttaagcaattctatacggtaaactaaaataaaaaagtttcctattttagtatttggcaaaagaataaattatatttctttgttgattttttaagttatcgtatcaatatttttctttttgagaatattatactgaacgtgagtatttttatgattgtttaaatttggcacttgcaaattatttaaaaagtaaaatggaaattaaaataatgtttctcctcttatttaagttgataacttgtaaaaaaatacaaaatatgatactgatttttttgaggaaaaaagttaatagtatttttcacacttctttttacataactaattaatttttatatgataaaaaaataatattcaagttcaaatacaattagaaatagaagacttgaatttttttaataaaatgttggacttttattgtttaattaacacaattttaacgaaaggattgattaatcaaaattaaataatatttaaattcaatacaaaattttgtgtatataggaattttaaaaagggagatagataaagtaaattcaaaattatttcctattctaagaattaactcgggggaattggataataaagtcaataattaaaaaaaggaaacgtcataaaaaaaagaaaaaagaaaagaaagacacttgcagtagtataaataatagaagttttatgatttatatgcagaagcaagaagcacttatacaattaagttgtttctatatatgcgttgcagaagttgaagaagtcagagaccttaatatgggtggactttgtggagtgtcctaaggttcaagatgaaaaaatggaagatcttgacatggacttgatggagtagtctatggttcaagttggaaaagtggggaccttgatatggatttggtggagtggccagcggtttctctagtagacaattttgttttcatttcttttattttgaataattaaaatttgatagtttaaaattaattatgggttcaaaccgcatgtaatagaatatttgaattttgtaaggcaagactttttgttgtttacttatcaggtacaggtttaacgaaaggtttgatttgaataataataaaaatttgaagactaattaagccaaatttaattatctttgatgtaaactacttaaagttttaaaaaaataattaatattttcttaaaataaaaatttcattgatttaagcaattctatacggtaaactaaaataaaaaatgtttcttgttttagtatttggcacaagaataaattatatttctttgtagattgtttaagttatcgtatggatttttattttttttagaatattatattgaacttgagtattctcatgattatttaaatttggcacttgcaattatttaaaaagcaaaatggaaattaaaattatgtttctcctcttatttaagttgataacttgtaaaaaatataaaatatgatactgattttttttgaaaaaaaaagttgatattctttttacttctttttttataactaattaatttttatatgataaataaaataatattcaagtttgaatacaattagaaatacatgacacaataacttttccaattgatgataattaaatctagtttttttttttcctatataagagaatactattctgtgaactgaaaaattgattaaaattaaataattagattggaacgaaattattttttatagattttttaatagaaatagtctttaaagtacacccttttcctataattgatttattcatcaattaaatgagttagatatttcaatatataaattgaatatttatttttctcttctatcactattcttaaactatcaccataaatgaagtttagacaaaaactttaatatatgaagacttgtggtctaacaataaatagctaggaccataattttataatttaaaaaacatgtcacccttctttctagatcttctaatttactttttaacttaaatatgatcatggagaaatttggaccaagacttataaaaggaaaaactatgatctcaataattatgatagatcaagttaaacaagcaatttaaacttctttgtatctcactaattaatttttaataaaaaagaaaataatattatgattaaaaaacaattagaaatagacaacacaacaatcattaatgaaaatgaagattaattagtttttttcacatataagaagaatattattttgtgaattgaaaaattgatcaaaattaaatagctagcttggaatgaaataatttttttaaccaaaatagtctttaaagtaaactcttttcctataattgatttattcatcaattatattttttttccttgcttgacttaactcacaacatttgttttcaatgtcagggaacttgatatgaaggtaatgcagtgatctatggttcaagttgaagaagtcagaccttaacatcatggctggactttgtggagtgtccaaaggttcaagatgaaaaaatggaaaaccttgagattgacttgatggtgtgagctatgatttagaagacaattttcttttatattatttttagtttgaatattgaaaatttgataatttaatattaatcatgggttgggatgtgatgaaatagaagtttaaccaaatgtacgtaacaaaagtttaacgaaaggattgattaaataatagttaaaatttgaagtttaatgacactaaattttcatttaagcagtattatagggtaaattaaaataaaatgattcttatttatttttgtaaaaaaaactgtaccaaaaagaatgtttcttatgttagtattcagcacaagaataaatcatatttctttgttattaattttgattttttatgaatttagtgtatataggaattttaaaaagggagatagatacagtaaatacaaaaattttcgtattctaagaattaatttgggagaattggataaataatagaagcaagaaaaaaacaggcagggcagcagtataaataatagaagtttgatgattaatatgcagaagcaagaagtagacttgtttcagctctaaaaaaaaaacacttgttttctatatttgcgttgcatgatcatgaattcctcctccatttatattcttgtctttctccacctttggttatgtaggttaccttgcagagagagtgtgtgcatcccaagtgagcgtgagacacttttgaagtttaagaataatctcatagatccttcaaataggctttggtcttggaatcataatcataccaactgttgccactggtatggagtcctctgccacaacgtcacttcccatcttcttcagcttcacctcaacacttcaccttctactgctttctatcgttactatgatggctactttgatagggaagcttataggggattccagtttggtggagagataagtccttgtttggctgatttaaagcatttgaattacttggacttgagcggcaatagatttcttggagaaggtatgtcaattccttctttccttgggacaatgacttccttgactcacctcgacctctctggtaatggattcatggggaagattccatctcagattgggaatctctccaatttggtctatcttgacctcgcaagttattatttaaattctctgattgctgaaaatgtagaatgggtatcaagtatgtggaagcttgaatatcttgatttgagtaatgcaaacctatccaaagcatttcattggctacacactctccaatctcttccttctttgacccacctatatttgtcatactgcacactccctcactataatgaaccatccttgctcaacttctcatctctgcaaactctcgatctttcccgtactcgttattcccctgccatttcttttgtccctaagtggatattcaaattgaagaaacttgtttctcttcaattacagggtaatgaaattcaaggtccgattcctggtggtattcgaaacctctcacttcttcaaaatattgacttgtctttcaactcattttcatcttctatacctaattgcttatacggtcttcatcgtctcaagttcctcaacctagtgcacaacaacttgcatgggactatttctgatgccctgggaaatttgacttctcttgttgaacttgttttgtcatataatcaacttgaaggaacaattccgacttttttgggaaatctccgcaactcaagggagatagatttaacatatctcgatctctctatgaataaattcagtggaaatccatttgaaagtcttggatcactctctaaattgtcatcgctttttattaatgacaataattttcaaggagttgtcaacgaagatgatcttgcaaatcttacaagtttgagggcgtttgatgcatcagggaacaatttcactttaaaagtgggtcccaattggcttcctaatttccatctttcctatttggatgtgacatcatggcatataggtcccaactttccatcgtggattcagtcacaaaacaaacttcgatatgttggactgtctaacacagggattttagattctattcccacttggttctgggaagcacagtctcaggttttgtatttaaacctctctcataatcatatccatggtgagcttgtgactactataaaaaatccaatatctatccaaactgttgatctaagcacaaatcacttatgtggtaaattaccccatctttcaaatgatgtgtatgagttagacctttcaaccaattcattctctgaatccatgcaagattttttatgtaacaatcaggacaagccaatgcaattagaatttctcaatcttgcatcaaataatctatcaggagaaatacctgattgttggattaattggccatttctagtggaagtgaatttacaaagcaaccattttgttgggaacttccccccatccatgggttccttggctgagctgcagtcattagaaattcgtaacaacttgctctcgggaatatttcctaccagtttgaagaagactagccaattgatatccttggatcttggagaaaataatctttcaggaactattccaccgtgggttggagaaaagctctcaaatatgaaaatcctccgccttcgatcaaacagtttttccggtcacattccaaatgaaatatgtcagatgagtcttcttcaggttttagaccttgcaaaaaataatttgtctggcaatatacccagctgtttccgtaacttgagtgccatgacactagtgaaccggagtccatttccccaaatctattcttatgcaccaaatgatacagcatactcttcggcatcaggtatagttagtgtgctactatggctaaaaggaagaggagatgagtatggaagcattctgggtttggtaacaagtattgatctgtcaagtaacaaattattaggagaaattcctagagaaatcacagatctaaatagattgaactttttgaacttgtcccacaaccaattgattggtcctattccagaaggtattggtaatatgggatcgttacaaaccattgatttttcgaggaatcaactttttggtgaaatccctccaaccatttctaatttgagctttttgagcatgctagacgtgtcttataatcatttgaagggaaaaattccaacaggaactcaattgcaaacctttgatgcctccagctttattggcaacaatctatgtggtccaccactgcccataaactgcagctccaatgggaaaactcatagtgatgaaggaagtcatgggcatggagtgaattggttttttgtcagtatgacaattggatttgttgcgggattctggatagtgattgctcctttacttatttgtagatcatggaggtatgcctattttcatttccttgatcacgtgtggttcaaacttcaatatttttgctcatgtagtatcagtgtttagtgttgcttagaatacaccgatgttttatcattgtattggcaggttgatcaatttgtagtcattgctatcttttttttttccagagtttagagccttatgtaaattctgttttgggatgtaaagatttgcatattgagcataatattacagatgaattctagttaatgtcgtaatttagatcaactagttgtaattctatgataaaaaaccatttgctaaatcacgtagattaagattgaaatagttactaaaaaaaaacatttgataaactctttggtttaaaccaagttttgaaaccacgtgtttggtcagttgcttaagttaatattgggtgagtttttttaaattaaagaaaaaaagtaattttgaaataaacattttttatataagcattttttttaagcaagctatgggatgtttcttaaaagaaacaaaagcagtttagataattatactaaaaaaagttacttattttattaaaataataatttatttcatcaaataaatttaaacaaactaatccattatatttcaattttcagtaatgtgttatatttaatgcataagagttgtactgtgggaattgttgtcattgcatctacatacacaagtgtatctatttttttttaagttatgtttctttgaaatttatccatatgcttgaatctctctggaaatgagatttcaaatattcccttgttgttgggtaatgaaatgcaaggtccgattccctggtggtattccaaacctcacacatcttcaaaattttgacttgtccaaaaattcattctcatattttgtttatttaaaatttagataatcttttaataatgtcatttaattttattttttataaatgaataaataaaatatttatttaataattaaataaatactaattaacaattttttttaaaggaaaacaaaataaaaaaataaaaaattctaaaattaaaaactttaaacgtaaaaaaaaaaaccaaaatgactataaagtcctaaaaggaaaaataaaataaaataaaataaaatttatcactttaaaatcctaatagaaaaacttataactttgaagtcgtaaaattaaaaaaaaaaatctaaatgactttgaagtaataaaaaaaaggaggcataaataattttacgatttaagttaaaaaaaaaaaaaagtcatattacgacttgtaacttaaatattataataccacttattcacttttggggcatgatttgaaaagtacccacatgagaaaaaaaaacagaaaaaatttgtccctagatgataaaataacccaatttgacggattaaattggagtttttaaaaatattgacatgctagatttttacaacaactcaattggtggtgccctttctagatgatttggaaaactttcaacattaagatatcttgatctgtctattgataaattcagtggaaatcgatttgaaagtctttgatcactctctaaattgtcatctcatgaatatctctaaattgtcatctcttcatattcatggcaatctttttcaaagagttgtcaaggaaaatgatcttagaaatcttacaagcttgaaggagtttcatgcatcagggaacaatttcactttaaaagtgggtcccaattggcttcctaattttcagcttacctctttgcatgtgagatcgtggcagtaaggtgccaattttccatcatggattcagtcacaaaacaaacttcaagatattggactgtctaacacggggattttagattctattcccatacggatgtgagaagcactttctcaggttttgtatttaaacctctcttacaatcatatccatggtgagcttgggactacattaaagaatccattatctatccatactattgatctaagctcaaatcacttatgtggtaaattatcctatctttcaagtgatgtgtttcggttagatctttcaagcaattcattctctgaacccaagaaattagaatttctgaatcttgcatcaaataatttgtctggagaaataccaaattgttggatgatttggccatttctagtggaagtgaatttacaaagcaaccattttgttgggaacttaccctcatccatgggaatgactacagagatagaaatgaggaggaattttactgtctttgttctgcataatgaagttttctcgtattatttagttttttcaccattttttgtttccttatcttcctgatgctattttagactcttctcaatcatcaaactgacagcctagacttgtttatttcagctttggtggaagttaatttttaatgtaatgaattattatatcactttgtgggataatgtactgtcttactctatcccactcaaaatatctttattgtttttcctattattgatttcatcacgagtcaagagttgttgtaattgtttctccaactaatggaattaatccgagaagacccacaaacccaacttgaacattttgttagatcacagggtgagagaaagcagtgcatactaaagtcaattttgagggaccaatggacttggaagaagatcctcattcccacaaagtacatatcaagtatatatgctccagccaattatcaagcagtggatccaacagcaattgtcatgttaatctttaagccaaggttaggatcatccctgtctttgagaataaggcagacacacttcttgttggtcttcatggcttgtgtgagaccactgcaacaatctgcggtgggtgctttcgtatcaccacccaaatatggcagacacgttgtaacacctgtcagggattctgcacatctctgtttgtcttgagctgaatctcccattgcatgactaaccaataccaatgttattgctaacactagcaagtgtggtagacaagcatttgaatccatttttcaatcttgatgaatgaatgagtggagatagattatattatagtctatggaacaagtttagaatgagtatacagaggagggttgtagctagaaatggttaagttgtggtgctacatgtaaaatgttgatttttttttttaaaaaaaatttattagaaggttctgtagtgtgttatgttttagaaaacatggtagttgggaaggaaactagtggatgaaaataaattctgtggtttcattgtgaactcacggaagaagaccagttagtttcttgacttagtcttgatcatttcaattttgtacaacaccaattgtgagttatatattatttctcgtggttatttatttatttatttttatctagagcttagtgttcatatgtgtgtgaatgtgatgaagatttaaaataaaatttttcaaatattaaagattttctttcaagaaaaaatttgtcaaaagatcaaatagtcgaatatatattatggattaaacacataattttattttcttcaaaaagtacattttcctaccccaaaagtgttaaatcctctcatgtgacaatgttgtcatcaaatttgaaaaaaaataactataaaaaattaaaaaatatatataacactactagaccaaaacacggttaaacactaaataaaattaaatatgttttatctttaataaatactcaatgtttatttttatcattaaatatgtttgtttgcttcaacaatctcatcagcaacctcagccaaaaacattgtcgcttagaagttcagatatgatgctgacaccggaacaactcaatcaagggatcacccagagaacacaggcagtgcaaaaccatcaacaatctcttcagcaacctctgcaatagctgataatgccatatcagccaaaaacacagtcacttccaagctcggatacggtgacaacaacaccgaagcaactcaaacaagccatcaagagaacacacaaccatcaacaatctctttagcaacagttgcaatagccgataaagccgtgtcagcaaaaaacaccgttacttccaagctcagatatggcgacaacactgaaacaaaaaaaactcaaaccactcaaacaaggaatcaattaaagaacacaggcaatgagaaaccttcaacaatctcatcagcaacctctgcaatagctgataaagctgtctcggccaaaaacaccgtagcttcaaagcttggttttggcgacgcagcaacaacaacacaacaagagaagagaactgaccatgttgctgctcctacaaaatatggaaaaagtgttgctaaataattgtattttgataatagaaaataaggcaaaattgtctttaaaaataattatttagcagttatttgcgcttaaatattaaagaattgatgttttgttgaattttggttgcagatataaaaactggaggtgtaacaagcaaaaaggccagaaaaattgaagaaaagaagaaaatctgaagtaggcccagcccaatacgcgcgctgagcgcgcgtcacacgctaagcccaatacacacgctaagcacgcgatctacatgggctaagcgaggggtgtcgcactgagcacgcctacgaaggtccaaagcccacttcaacaactataaatagagagtcagtccgaaggaaagagactacgacagaaccccctctcccaggggtttcatttactccctctctttctttcaccccttctcattgtaaagccctcatgatcatgagtggctaattccctagctagggtctggcaggcctaaaaggccaatgatgtatggatcatttcaagagttatcaataaaaaaaggaattccctccagattcttttatttatttaccgttctttctttttacatcctgtatctcggaacttgctttctgttagggtttagtccactcgggagagggtaaagcctaattaggggtaaggaattaatacttgaatctgttttaagggttagaccactcgggagagggtaacgcttaatagaacactaaaaggaagaaattatctcttagagggttttccttctaggttcttttatatgcttttctttcttatttattctgcatttcaaactttattttctgttaatctttaggccactcgggagagggtaaagcctaagtagggataaggaatgaatgcgtgaatcgattttaagggttaggccactcgggagagggtaaggcttaatagaacaataaaagaaagaaatcattgggttagcatgacttaatgccccaatacccatgctttagcaattatctagaatgtaatcttaatgcatcttagttattgagtcttcgcaaagggcatttgaaagataggtaattaaggtaggcttgtcatcatgaggcatcaggggcaagtagatggatagatgtgggacagaattagttcactggtattgataacagacaaatccagaatccaggctaattagacttgttaggttttagcgatttttaatatatagattttattccctattattattgttggtttttcttagaagtagttattccttttattttattgttgttgggttttaggagtaagtatttagatttagtagatttagattttatttatttgaatttcgtagaagtagttatctttatcgcaatttaaatattctatcttctattttgatctttgaatctttcatctttttcttttatcttctcatcttatctttaaatatcttatcttttcttttatcttctaattttatctttaaatatcttatcttttctttaccttatcttaatctaagtacaaacaagagaagagaactgaccatgctgctgctcctacagaatatggaaaaagtgttgctcagtctctgacagagaaactagctccagtttctggaaaagttgctggtgcaggaagtggtgtgaagtccaaagtttctggaactcaaactagtagtatgggtgtggaacaggacaagggggtttctgtgaaggactatttggtggacaaactgaggcctggtgatgaagacagggctctctctgaagtgatatcagagactctgcacaagaaggaactgcccccagtggaagttactgaagaaggtgtgagaaaggtggtttctgatgctgtgcataagagagaggatgatcctgagagaagaatggaacatcaaagaatactgggaaaggtaactgagtcagaggaagtgaagagaaggttaggaggtgaaagtgtggtgacagagaaaaagaaccaagagatgtatgtgaatagtccagggaaaggtgtggttgataagcttaaaggtgtggttgggacatggtttaccaacccagcagagaatcaatcttcacaaggtaaataacaatgaatagtagctctagttgtctccatgaggtttctcttgtttgatcaatgccttttgcaaattttacttatttctaaattagttgattgtattcttttaccatacttctctgactaattcttttgttactcttcacattctgcttgagttttacagctagacaaacatattttgtatcgatattaaaattgattttctctctatatgtttattatatttgtcttgtgacattttttctattttcttatcttggaaaaagtgttttgagaaacaaacgaaattatgattatgtatgtttctgttagtcttaagacttgattccaagatgaatcgcagttacttgtttacttgttttggtcatgcttgcatatttttctatacgtttcttttttttttttttcattttgtaagaactgtttcaaaaaaagtggagtattttttatcctagtggttttagacttcagtccaaggtgagttacaattttatttttttttactttattttgggtatgctattttttactgaagcaaagtgccacattaattttgaatttgtgtttgcatgggtcgaagattcatctatgaactatgaggcaggaagggcagaagtggaacaagttaaccaaggtgcagcaggtgaaagaaggctgcaggagtcatctaattgaagaagggtctttgctttgggtgattgtgtagattttcttaaaagctgtttctatatctgtgtgtctagttctttgttggaagaaagctaggatgttcaagtcacagtaaaataaaaaaattgtgttttttttaatgtttatgtaaatatccaattttttccgggtttatttttatcttttaaataaaaatatttaaaatatttttgagaaaaagaaaaaagaaaaattatagaagatgtgacagttacaaaattgatcatcagaaaactggagtaatggtgattcaattgagcaaaaaataaaatattagtaaaagaaaacgtcattgaagttggtagtctaaaaacaaggagatggtggtataaaggaatcctaagttgttcttggaatataaaagaagagacgcactagcatacaaggagggggacggagaaaaaaggagaattctgtgacgggaaacccgtagaaagattgttttttcgcaattctttaaagatgattatgatgctataagatcaggtccttgttcttttttctctataagatcaggtttgttctttttttttttcttttccctcgttcatttgttgttatgtttggcttttttatttaatttttggtttcatgaattcgtgtatgtatgctatccaaatgtttattttctaataagtatatacattttgacaacatgtttaccttcatattgtaggttaaaaagcatcatttttttattgcttattggtcctcgaaaaatattcattttttttatctctaataattttttttcggatcagatttcaaatatttaaaattttttgtttcagatctttattgttagttcaaaatcattatttatccacgtggttgttaatcggccatgatgcatgtcacttgtgtgtgtattctttgtctgattgggatgatcgggttgggattattgggattacacaagtgcaaatctttttttaaaaaaaataaaaatgatgtcgtattaccccttttttctttcttctatttgtctccatcatctttcctcagatggtgtttcattttctatttgtctccatcacccatcatcttctccagatggtgtttcatttttatttgtcttcatcacccatcatcttcctcagatggtgtttcattttccccccagtaggtggactaaatgaaaacaagctagatgaaagaatagacatgaaccaataaaatcttaacaacaaaaaatcaaatcaaaaaatcgagaaaagaaaaactgtttgatgggtttcactaggtttcacgagtggattcgcagttggattgatcacagttgttgggttttatgacggggttgcagttgagatcaaagttgggttcctgccaataattctacactatgaataaagataaagaaatttctacactatgaatatttggaattgattaagattagctaattcgatctaaataacaatatgcataaagataaatataaaaaaattaaaggaagaaataaaaataagaaaattcaggaaggaaataaatgaaaaaaaataaggaaaaactttttgtttgggaattttaacaaacactaaatcaatgaaaaaattgttcaggcttaattttattggagttcctatcacctaatcactcacatttatatttaataaatgttatattatcattaatctaccatattgtcttaacattaattcctttaacattaattccttaagtgaggagatccaaatccattgattaaactattaatcttttgaattagcataatcaaaagattttcattaaaacaaagtatttattgttgttcaactatcttcagacataaaaattattgagtgctctctccaattcgtagctcaaagaaatttttcttagaattgaataaaaaatcatacaaatatgtgaccaagttaaaaatacttattagacatagaagaaaaacaattacaatattttattgaataaaaaagtaatcattacatggaagaaccaattacattaaactctaagagaagattggtttatggaaataaaaaaacataagagatatacatcacattctaaaatgacaccaaaatctaagaatacatatgataattatcactcatccaaacttagcttaggataaaaaaataacattaaaattttatagggacgaaaatgatatactttagtctattttttttcttgcttgacataactctcaacatttgttgtcagtcataaaaaactttgacatggatttgatagagtagcctatgtggttcaagttaaaaaaatggagaacttgatatggatttggtggagttgtctaaggtttgtctaaaagacaatatttttattttattttattttgaataataaaattttgataatttaaattaattatagtttcaaatatgtagtaaaatatttaaatttaataatgtaagactttttgttgtttacttatcacacatgtaataaaaggattgatataaataatagttataataaaaggattgatttaaataatagttataatttgaagagtcattattaaaccaaattttattacctttattgtaaactactaatgttttttttataaaaatattaacatttacttaaaataaattttttattaatttaaacaattctacacattgaactaagaaaataaaatatttcttattttagtatttggcacaagattaaattatattttttatagattatttaagttatcgtatgaattatttttttaaaatattatattgaaggtgagtatttttatgattgcttaaatttggcacttaaaattattttaaaagtaaaatggagattaaaattatgttgctcctattatttaagttgataacttgtgaggaaaataaaaaatatgatacaaatttttgtgataaaataattaatattcattttcaaattaattagaaatagacaattaacacaaacaacctttccaaataatgataatgaaaactaaaaaacgtatgcatgaagaatgcaaatcttcataagttggatatttcaataaattgtaaatttatttttctcttctatcactattcttaaaatatcaccacacatgtaaaagaaattcaggcaaagactttaatatatgaagacctgtggtctaacaatagaatagctaggaccatggataaataatttaaaaagacatgtcacacttcttggtagatcatatactctaatttacattttaagttaaatataatctacaatacatggagaaatttggaccaagacttataaaaggaaaaactatgatctcaataattatgatagaccaagttaaacaagcattttagacttctttgtatctcactaattaatttttaatgaaaaagtaaataatattcaagttaaaataaaattagaaatagtcgacacaacaatctttccaattgatgatagtgaaaattagtcttttttcatgtataagaagaatattattttgtaaattaaaaaatggatcaaaattaaatagctagattggaatgaaatagtctttttttatatagattttttaaccgaaatagtctttgaatttagatccttttcctataattgatgtattcatcatttataattttttcatttcttaattgtaaacatttgttgtcaatgataaggaacttgatatgaaggtaatatagtgtcctatatggaggaccttgacatggacttcatggagtagcctatggttcaagttggaaaagtggggaccttgatatggatttggtggagtggccagctggtggtcaggagaaaattttgtttttcatttcttttattttgaataataaaaatttgatagtttaaaattaattatgggttgaaattgcaagtaatagaatatttgaattttataatgcaagactttttgttatttacttaacacaagtgtaacgaaagaattgatttaaataatagttaaaatttgaagaagaattaagctaaatttaattaccttttatgtaattaaactactcaaaatattaaaaaattattaatattttcttaaatcaaaattttcattgatttaagaaattctatacggtaaactaaaataaaaaatgtttcttattttagtatttggcacaagaataaattatatttctttgtagattatttaagttaacgtatgaatttgttttttagaatattatattgaaggtgagtatttttatgattgcttaaatttggaacttgcaattatttaaaaattaaaattatgtttctcctcttatttaagttgataacctgtaaaaaatataaaatatgatactgatttttttgagaaaaaagttaatatatattctttttcacacttctttttatacaactaattaatttataatattcaggtttgaatacaattagaaatatataatacaacaactttccaattgatgacaattaaatctaatctgtttttcatatataagagaatattattttgtgaattgaaaaattgatcaaaattaaatagttagcttggaatgaaataatctttttttgtagatttttttaatccgaaatagtctttaaagtacaccctcttcctataattgatttattcatcaattatattttttttccttgcttgacttaactagctcgcaacatttgttatgaatgacagggaacttgataggaaggtaatgcattgccctatggttaaagttgaagaagaccataacatgactggactttgtggagtgttcaaaggttcaagatgaataatggaaaaccttgagatggacctaatggtgtgggctatgggttgggatatcatgaaatagtacatttgttgtcaatgacaggaaacttcatatgagcacaagaatgttagaagacaattttcttttacattatttttgtaaaaaaaacccataacccataacatggctgatggtgtgggctatgggttgggatgtcatgaaatagtacatttgttgtcaatgacaggaaacttcatatgaacacaataatgttagaagataattttcttttacattatttttgtaaaaaaaactgtaccaaaaagaatgtttcttattttagtattgagcacaagaacaaatcatatttctttgttattaattttgatttttttatgaatttagtgtacataggaattttaaaaaaggagatagatacagtaaatgcataatttttcgtattctaagaattaattcgggagaattggataattaagtcaataatttaaaaaagccagcataaaaaaagaagaagtgaattaaaattttaaaaaaggaaacgtcaaaaataaaatttcctaatttttttacttaaaattaaagttttaaaaatatattttagtatttggcacaataataaaaaaggttaaaaaaaatgaaagtgaagaaaaaaacagtcagggcagcagtataaataatagaagttttatgattaatatgcagaaccaagaagcacttatacaattaagctgtttcatatatcctttttgtgatcatgaattcctcctccatttatattcttgtctttgtccagctttggttgttgagcttaccatgcagagagagtgtgtgcatcccaagtgagtgtgagacacttatgaagattaagaataatctgaatgatccttcaaataggctttggtcttggaatcataatcataccaactgttgccactggtatggagtcctctgccacaaccttacttcccatgttcttcagcttcacctcagctcttcacattctcctttcgatgatgactacaattgggaagcttatcggagatggatctttggtggagagataagtccttgtctggctgatttaaagcatttgaattacttggacttgagcgccaatgtatttcttggagaaggtatgtcaattccttctttcctttggacaatgacttccttgactcacctcaacctcgctcttacttcattcatggggaagattcctcctcagatcgggaatctctctaagcttcgatatcttgacttgagcttcaattatttccttggagaaggtatggcaattccttctttcctttgtgcaatgagctccttgactcacctagacctctctggtactgtattccatgggaagattcctcctcagattgggaatctctcaaatttggtgtatcttgacctgagttctgttgttgccaacggaacagtaccctctcagatcgggaatctctctaagcttcgatatcttgacttgagcggcaatgaattccttggagaaggtatggcaattccttctttcctttgtgcaataacctccttgactcacctcgacctctctcttactggactcatggggaagattccatctcagattgggaatctctccaatttggtgtatcttggccttggaggtcattctgttgtcgaacctctgtttgctgaaaatgtagaatggctatcaagtatgtggaagcttgaatatcttcatttgagtaatgcaagcctatccaaagcatttcattggctactgttaggtgcaagctgtattactgacttcgagggtcagttcctccagaaattcaagggagaaagggaagaattaacaaggtgaggaaaaggggatttcttatttttctccctcagcttgttatttacatagtattatatagacattcccataacagaatttggacaattgctctcctacgaatattctagtaacagaattcctattgctattttgcccacgaggaaataaggtgctgcaagcatgatttggtggagattctctaatttcccctttttccggtattgccctcttcagctcaaacataatctgcaaggtaggtgggtttcacaattcttcttttgctcttggtctcttctcccttttgcacccctgtagctggtgtttcttctgttatggtctcttctcccttttgcacccctgtagctggtgcttcttctgttaggttcgtatcactccatggcccatggaaatccaccttgtcctcaaggtggtaagcttggcataatgcagaccaatcctcccaggatgtatcatctggggacagacccttccattgcaccagtacttcatatgaatccgcagtcttcctatagttcagaatagcgagaggggtaataacaggttggccattaatgaattgggtgggtaaggaagtaacatgaggtggtgtcgggttgcctttgaaaggtttaagtaacgaacagtgaaaaacagagtggattttggctgctgctggcaactcaagtcgatatgcagctgtcccgacacgtgccaaaattctgaatgggccataaaaacgttttgctaactttcctgagtgttcttgagttcctttgaccgttgactgacgacgaggcctgagtttcaccaaaacccactcattgacttcgtagcttacatctctgcgagcattatcagcgtgtcgtttcatgatgtcctgagcttttagtaatttcttgcgaactgattgaaacgtgacgtccctatccacgaaaaattcttcaacagcatcaatctttgaggttcccgcaagatactcaggaaaggaaggaggcttgcgaccataggtaatttcataaggtgtgacgccggaactcacaacccaggaagaattatgtgaccattccacccatggcaaaaatttgccccaattccctggccgccgatgaacaaaggcccgcaaatattgttcaattacgcggttgaggacctcagtttggccatcactctggggatggtaagctgagctcatcctcaagaccgtgccactcaagcgaaataactcctgccagaagtgacccatgaacaaaggatctctgtcggaaactatacttcgagggaggccatgaagtttgagcacgatgttcaagaataaagaagcgaccatgtgagccgtatgagaggtgggcaacatacccaaatggatgcccttcgaaaatcgatccaccacaacgaagatggcggtctgtccgtgataagaaggcaagcctataatgaaatccatggatagatcttcccatggacgatgaggaactgggagggggcataacagacctgctgatttctttgcttcatattttgtgagttgacaatctaaacaattggcaatgaaacgagtgacgtcatctcgaagtctcggccaagtgaaattttccaatagacgagccatcgtcttagtaactccggcgtgcccaccggtgggcgttgcgtgatattcctgtaacagagtggggatcatgggtaagtcacgaggtacccaaattcttcccttatgcaggacgaggtcctgtgtgattgagaatccgggatggttggttgggtccgcaaggatggcttgtcgaagtgtgttgtagtccggatgggcatccagttgcgttcgtaactccttcaggaaggagaagcatgggacggatagaatcatggtcaacgtggattgctgttccggcaacctagataaagcatcagctactttattggtggatccggaccggtattggatgtcgtagtcgtagcccatcaatcgagccatgtacaagtgctgttcgggagtctggataacttgagtgagaagctccttcaagctacggtggtcggtgaggatggtaaaacggtggcccaacaagtattgacgccatttacgcacggccgtcgtgatggcacagagctcgcggacataggcggaggaacgcaacagtttggcggtgaagggcttgctgaagaaggcgatggggtggccttgctgggagaggacggctcccattcccacccccgaagcatcagtctccaaagtgaatgctatggtgaaatccggcaaggctagcaccggcgctgtggatagagcctccttgagttggtcaaaggctaattgggccggagttgaccattgaaaagaggaaagggtggtgactttgaccaaaggtgccgctatggtcgcgtagccgcggatgaaccggcgataaaatccggcgagtccgagaaagctgcgtaagtcccgcgtggattgaggaattggccattgttgtatggcggaaattttggaagggactggttccacgcctcggacagatacgacatgacccaaatactccacctgcggctgcgcgaaggagcacttaggtaatttcaaaacaaactggttagtgagtaatacctcaaatgtcgtctcgagatggcgcagatgatcctcaaaggtcctactataaaccagaatatcgtcgaagaagacgatgatgaattgtcgtaagtagggacgaaagagcatgttcatcgtagcttgaaacgacgaaggggcgttgcataacccgaacggcatcaccttaaattcatagtggccgtggtgggttctgaaagctgttttgggtatgtcggcatcatgcatgcggatttggtggtaaccttgtaagaggtccaatttggagaaacagcaagcaccgcccaactcatctaagagttcatcaattgtcggtattggaaaacggtctttgactgtaacagcgttgagggctcgataatctacgcaaaaacgccaggaaccatcatgtttcttcaccagtaagaccggtgaggaaaacggactggtgctgggttgaatgaatcctttctgaagcatcgcgtccacctgcaactcgatttcatgcttttggaagtgaggataccggtagggacgaacattgaccggagaggtctgtggaagtaagtgtatgtggtgatcggtgcttcgtgccggcggcaatgattgaggttgttggaacagagcagcaaaccggaaaagtagagttcggatgtcaggggggtatatcggggcatccccggaaggggtctcagtgggaagcatcgtgatatggaagcaaaagctagggccctgagttcgacagaaacgtcgaaattgtggggaagatagttgccggaagttagcgtcatggtcacctttcaattccacaaagcgacccttatagaagaattgcatggaaagggtggcatagtccgtgagaacaggccctaaggattggagccactggactccaagcacgacattggcgccggaaattgggagcacataaaggtccaccgtgaattgcgaggtctggatagtcaccggaatgtttgcgcacacacggttacattcgagatgttggccattgccaaccattactcgaagtgggcttgtgggttgacatggaaggcccaggagcgtgaccagctgttcttgaataaaattatgggtgcttcccccatcaatgaggaagatcacctggtgctcggtgatggtgcccaccaaacggagggtctctggtgctacgtggccggccagtgaatttaggctgatttgggctggtactgggtcatattgggtataagtgtattgggccgggtcggggtcgggtgggtctgtttgtgggtcgatagggtttatttggtcatccggggggtcatcgccttccacaagtagaaggaagactcgagaggcgcacttgtgccctcgatggtacttctcttcacatgtgaagcaaagcccgcgttcgcggcgcaatgcgatttcctccgatgataaccgtttgtaagctgggttttggcgtggtggtgtgggtaagagaggggggttgttgtgcgggacgggagagggtgagggtgggtacgttggtggtgtaatggtggagggtgagtacgtgggtggtggaacggttgagggggaaagagggtacacaggtgtaggtgggtgcgtcatggggttgacgcgcggagaagtcgtggtggtgataaagggtggtcgggggcgcggaggaggtctatggtccatcaacttttcctcctggaggcgagcaaggcccgcggcctgagccatggtcagaggttgtgatgcttgcacctcgcggcgtatgtcaggggagaggccagacacgaagcagctgaggagaaaaggagagggcaatccgacgacacggttggctaggctctcaaattcagacaggtaagaactcacggttcccttctgtgttaatttgaaaagtgctccggtgggatcctcaaactgtgacggggcaaatctggtttgtagtgcatgtaacaacaccgaccaagatgtaaattggccgttgtcggacatccattgaaaccaggctaaggcccttccctccatataaaacgatgctatggtcaaacgctcatgagcgggagttccatggtactcgaaaaactggttgatcttaaagatccaaccagaggggtcagtgccgtcgaaacgcggcacatctaacttcattttgtggactgatgcaggtgaaagtgatggcggaggaaggacaggggtaggtgatggagtgggtgaagaaagcggaggtagacgatgaaggagttcatcgattttgctggtcaaggttagctgttggtgtgtaaggcggagaagggcgtcttcgagtttgtcagaaggagtggggctcgaatccggcatcgcaacgagagcaccaaaaatgttaggtgcaagctgtattactgacttcgagggtcagttcctccagaaattcaagggagaaagggaagaattaacaaggtgaggaaaaggggatttcttatttttctccctcagcttgttatttacatagtattatatagacattcccataacagaatttggacaattgctctcctacgaatattctagtaacagaattcctattgctattttgcccacgaggaaataaggtgctgcaagcatgatttggtggagattctctaatttcccctttttccggtattgccctcttcagctcaaacataatctgcaaggtaggtgggtttcacaattcttcttttgctcttggtctcttctcccttttgcacccctgtagctggtgtttcttctgttatggtctcttctcccttttgcacccctgtagctggtgcttcttctgttaggttcgtatcagctacacactctccaatctcttccttctttgacccacctatatttgtcaaactgcacactccctcactataatgaaccatccttgctcaacttctcatctctgcaaactctccatctttccaatattagttattcccctgccatttcttttgtccccaagtggatattcaaattgaagaaacttgtttctcttcaattaccgggtaatgaaatccaaggtccgattcctggtggtattcgaaacctcacacttcttcaaaatcttgacttgtctggaaattcattctcatcttctatacctgattgcttatgcggtcttcatcgtctcaagtctttggacctaagttccagcaacttgcatgggactatttctgatgccccggaaaatttgacttctcttgttgaacttgatttgtcatataatcaacttgaaggaaccattccaacttcttcgggaaatttgacttctcttgttgaacttgatttatcacgtaatcaacttgaaggaacaattccgacttttttgggtaatctccgcaacttaagggagatagatttaaaatctctctctctctcttttaataaattcagtggaaatccatttgaaagtcttggatcactctctaaattgtcatatctttatattgatggcaataattttcaaggagttgtcaaggaagatgatcttgcaaatcttacaagcttggagcagtttagtgcatcaggaaacaatttcactttaaaagtgggtcccaattggattcctaattttcaacttacctttttggaagtgacatcatggcagttaggtcccagctttccatcgtggattcagtcacaaaacaaacttcaatatgttggactgtctaacacggggattttagattctattcccacttggttctgggaaccacactctcaggttttgtatttaaacctctctcataatcatatccatggtgagcttgtgactacaataaaaaatccaatatctatccaaactgttgatctaagcacaaatcacttatgtggtaaattaccctatctttcaaatgatgtgtatgggttagacctttcgaccaattcattctctgaatccatgcaagattttttatgtaacaatcaggacaaaccaatgcaattagaaattctcaatcttgcatcaaataatctatcaggagaaatacctgattgttggattaattggccatttctagtggaagtgaatttacaaagcaaccattttgttgggaacttccccccatccatgggttccttggctgagctgcagtcattagaaattcgtaacaacttgctctcgggaatatttcctaccagtttgaagaagactagccaattgatatccttggatcttggagaaaataatctttcaggatgtattccaacatgggttggagaaaagctctcaaatatgaaaatcctccgccttcgatcaaacagtttttccggtcacattccaaatgaaatatgtcagatgagtcttcttcaggttttagaccttgcaaaaaataatttttctggcaatatacccagctgtttccgtaacttgagtgccatgacactagtgaaccggagtacatatccccgtatctattctcatgcaccaaatgatacatattactcttcggtatcaggtatagttagtgtgctactatggctaaaaggaagaggagatgagtatcgaaacattctgggtttggtaacaagtattgatctgtcaagtaacaaattattaggagatattcctagagaaatcacagatctaaatggattgaactttttgaacttgtcccacaaccaattgattggtcctattccagaaggtattggtaatatgggatcgttacaaaccattgatctttcaaggaatcaaatttctggtgaaatccctccaaccatttctaatttgagctttttgagcatgctagacgtgtcttataatcatttgaagggaaaaattccaacaggaactcgattgcaaacctttgatgcctccagatttattggcaacaatctatgtggtccaccactgcccataaactgcagctccaatgggaaaactcatagttatgaaggaagtgatgggcatggagtgaattggttttttgttagtgcgacaattggatttgttgtgggattctggatagtgattgctcctttactgatttgtagatcatggaggtatgcctattttcatttccttgatcatgtgtggttcaaacttcaatctttttactcatgtggtatcagtgtttagtgttgcttagaatacaccgatgttgtatcattgtattggcaggttgatcaatttatgtcaacaaataaatttaaacaaactaatccattatatttcaattttcagtaatgtgttatatttaatggataagagttgtaccgtgggaattgttgtcattgcatctacatacacaagtgtatctatttttttttaagttatgtttctttgaaatttattcatatgtttgaatctctcttgaaatgagatttcaaatattcccttgttgttgggtaatgaaatccaaggtcgatccgattccctggtggtattcgaaacctcacacttctttaaaatcttgacttgtctaaaaattcattctcatattctatacttgattggttatacggtcttcatcgtctcaagtatttggacttaaggtacagcaatttgcataggactatttatcaagtcaagattgatcaatccgaagcaaccattcgaacttcttggggtaatctcagcaacttgggaacttgggggagattgatttcttatatctcaaactcaaccaacaggttaatgatattttagaaattctagctctttgtatttctcatggattcacaacacttgcagtttcgagttcacaactttcagtcaatttgactgctttttaccattcagggatatttttcaaaagacaataagtcttatcaggtgctactatatatgagttagaagccataaaatcactctttattaactgaagtcgtaaaattatttatgactttaatgtaattttttttatttgggactttaaagtggttaattttttttttaattttacaactagtctttttttaatttttttaactaaagactttcaaactgtaagtttaatttttttttctttttatgacttttgaaattgtgtttcgtttttttttacgtttaaattttttaattttagaattttttacttacttgtattttatttttttgtttttattttttttcaaaaattataaaaaaattatttatttaattattcagtaaatattttatttattcatttaaaaaataaaattctataacattatttcaaaattatctaaattttaaatatgtaaaatatattaaataaaataatattaaaaaacataatatattttaaataaaaaatatataatatattaaataaaaccataaaaaaatataatacaaatcaaataaaactaatagtataaaatttttccattttaattattttttatttaacatatttggtttatttaaaatttagataatcttttaataatgtcattgaattttttttaaaatgaataaataaaatatttatttaataattaaataaataaaattaataacattttaaaaaatgtaacaaaataaaaaataaaatacaagaaaataaaaaattctaaaattaaaaaccttaaacgtaaacaaaaaaccaaaatgactacaaagtcgtaaaaagaaaaataaaataaaaaaacaaaacttatcactttgatatcataatacaaaaactattgactttgaattcaattttctaaaggaaaacgtttaaaacttctcgtaatcgattataagtcttgtgtaatcgattataggctttaaaattaaattcaaatttgtatgagcattttagaaattaatttggtcacgggtaatcaattacattatctggtaatcgattacccgagagtaaatatcacttttatgaaatcttaagaagcttctggaaaatattctttggccagggcatcatcaattcagaaattctttctaagattgtaggaactaagttcattaattatattgaatttctggattgacttggatcaaacgtgagaagcgcttagaagctcagccaaagcctcagccaaaaacactgtcgcttggaagctcggatatgacgctgacaccaaaacaactcaatcaagggatcaccaagagaacacaggcagtgcaaaaccatcaacaatctcttcagcaacctctgcaatagctgataaagccatataagccaaaaacacagtctcttccaagctcggatacgctgacaacaacactgaaacaactcaagcaagccatcaagagaacacacaaccatcaacaatctctttagcaacagcttgcaatagctgataaagccgtgtcagcaaaaaacaccgtagcttccaacctcggatatggcaacaacactgaaacaaaaacaactcaaaccactcaaacaaggaatcaattaaagaacacaggcaatgagaaaccttcaaccatctcatcagcaacctctgcaatagctgataaagctttctcagccaaaaacaccgtagcttcgaagcttggttctggcgacacagcaacaacaacaccacaagagaagagaactgaccatgctgctgctcctacagaatatggaaaaagtgttgctcagtctctgacagagaaactagctccagtttctggaaaagatgctggtgtaggaagtggtgtgaagtccaaagtttctggaactcaaactagtagtatgggtgtggaacaggacaagggggtttctgtgaaggactatttggtggacaaactgaggcctggtgatgaagacagggctctctctgaagtgataccagagactctgcacaagaaggaactgcccccagtggaagttactgaagaaggtgtgagaaaggtggtttctgatgctgtgcataagagagaggatgatcctgagagaagaatggaacatcaaagaatactgggaaaggtaactgagtcagaggaagtgaagagaaggttaggaggtgaaagtgtggtgacagagaaaaagtaccaagagatgtatgtgaatagtccggggaaaggtgtggttgataagcttaaaggtgtggttgggacatggtttaccgacccagcagagaatcaatcttcacaaggtaaataacaatgaatagtagctctagttgtctccatgaggtttctcttgtttgatcaatgccttttgcaaattttacttatttctaaattagttgattgtattcttttaccatacttctctgactaattcttttgttactcttcacattctgcttgagttttgcagctagacaaacatattttgtatcgatattaaaatttattttctctctatttgtttattatatttgtcttgtgacatttttttctattttcttatcttggaaaaagtgttttgagaaacaaacgaaattatgattatgtatgtttctgttagtcttaagacttgattccaagatgaatcgcagttatttgtttacttgttttggtcatgcttgcatatttttctatacgtctctttttttttttttcattttgtaagaactgtttaaaaaaaagtggagtattttttatcctagtggttttagacttcagtccaaggtgagttacaattttattttttttactttattttgggtatatgctattttttactgaagcaaagtgccacattaattttgaatttgtggtttgcatgggtcgaagattcatctatgaattatgaggcaggaagggcagaagtggaacaagttaaccaaggtgcagcaggtgaaagaaggctgcaggagtcatctaattgaagaaaggctttgaaggagtctttgctttgggtgattgggtaaattttcttaaaagctgtttctatatctgtgtgtctagttctttgttggaagaaagttaggatgttcaagtcacagtaaaataaaaaatttgtgtttttttttaatgtttatgtaaatatccaattttttccgggtttatttttatcttttaaataaaaatatttaaaacatttttgagaaaaagaaaaaagaaaaattatagaagatgtgacagttacaaaattgatcatcagaaaactggagtaatggtgattcaattgagcaaaaaataaaatattagtaaaagataacgtcattgaagtttttagtctaaaaacaaggagatggtggtataaaggaatcctaagttgttcttggaatataaaagaagagacgcactagcatacaaggagaattctgtgaagggaaacccatagaaagattgttttttcgcaattctttcaaaagatgattatgatgctataagatcaggtttgttcttcttcttccttttttttttcttttccctcgttcatttgttgttatgtttgacttttcatttaatttttggtttcatgaattcgtgtatgtatgctatccaaatgtttattttctaataagcatatacattttgaccacatgtttaccttcatattgtgggttaaaaagcatcattttttattgcttattggtcctcgaaaaatattcatttttttttgtttgatctttaataattttttttcggatcagatttcttgaaatttttgaaattttttgtttcagatctttattgttagttcaaaatcattattcatccacgtggttgttaattggccatgatgcatgtcactcgtgtgtgtattctttgtctgattgggattatcgggttggaaatatcggaattacacgtgcaaattttttttttttaaataaaaataaaaatgatgtcctattaccccttttttctttcttctatttgtctccatcatccatcatctttcctcatatggtgtttcattttctatttgtctccatcacccatcatcttctccagatgctgtttcattttctattcgtcttcatcacccatcatctttctcagatggtgtttcattttccccccagtaggtggactaaatgaaaacaagctagatgaaagaatagacatagacatgaaccaataaaatcttaacaacaaaaaatcaaatcacaaaatcgagaaaagaaaaactgtttgatgggcttcactaggtttcacgagtggatttgcagttggattgatcacagttgttgggttttatgacggggttgcagttgagatcaaagttgggttcctgccaataattctacactatgaataaagataaagaaatttgtacactatgaatatttggaattaattaagattggctaattcgatctaaataacaatatgcataaagataaagaaattaaaggaagaaataaaaataagaaaattaaggaaggaaatatatgaaaaaaataaagaaaaactttttgtttgggaattttaacaaacacgtcaggtttaattttattggagctcctatcacctaatcactcacatttatatttaataaatgttatattatcattaatccaccatattgtcttaacattaattccttaagtgaagagatccaaatccattgattaaactattaacattaattccttaagtggagagattcaaatccattgattaaactattaattctttggattagcataaccaaacgatttccattaaaacaaagaccttattgatgttcaactatctccagacataaaaattattgagtattctctctaatttgtagctcaaagaaatttttctattacaattaaataaaaaatcatacaaataggtgaccaagttaaaaatacatattagacataaaagaaaaacaattacaatattttattgaataaaaaagtaatcattacatggaataaccaattagattggttcatggcaataaaaaaaacataagagatatacatcacatcctaaaatggcaccaaaatctaaccaaaatttaagaatacatgataattatcactcatccaaacttagcttaggataaaaaaaataacattaaaattttatagggacgaaaatgatatattttagtctattatttttcttgcttgacataactctcaacatttgttgttggtcataaaaaactttgagatggatttgatggagtggcctatgattcaagttaaaaaagtggggaccttgatgtgaatttggtggagttgtctaaggtttgtctaaaagacaatattttttcttttattttattttgaataataaaattttgataattatagtttcaaatatgtagtaacatacttgaatttaataatgtaagaccttttattgtttacttatcacacatgtaataaaaggattaatttaaataatagttataatttgaagactcattattaaaccaaattttattacctttattgtaaattactaatgttttttttattaaaatattaacatttacttaaaatacatttttttattaatttaagcaattctacacgttaaactaagaaaataaaatgtttcttattttaatatttggcacaagaataaattatatttctttgtagattatttaagttatcgtatgaattatttttttaaaatattatattgaaggtgagtatttttatgattgcttaaatttggcacttaaaattatttaaaaagtaaaatggagattaaagttatgttgctcctattatttaagctgataacttgtgaggaaaataaaaaatatgatacaaaattttgtgataaaataattaatattcattttcaaattaattagaaatagacaattaacacaaacaacctttccaaataatgataatgaaaactgaaaaacgtatgcatgaagaatgcaaatcttcataagtttgatatttcaataaattgtaaatttatttttctcttctatcactattcttaaaatatcaccacacaagtaagagaaatccaggcaaagactttaatatatgaagacctgtggtctaacaatggtctaacaatagaatagctaggaccatggataaataatttaaaaaaacatgccacacttcttggtagatcatatactctaatttacattttaagttaaatatgatctacaatacatggagaaatttggaccaagacttataaaaggaaaaactatgatctcaataattatgatagaccaagttaaacaagcattttagacttctttgtatctcactaattaatttttaatgaaaaagtaaataatattcaagttaaaataaaattagaaatagtcgacacaacaatctttccaattgatgatagtgaaaattagtcttttttcatgtataagaagaatattattttgcaaattaaaaaatggatcaaaattaaatagatagattggaacgaaatagtcttttttttatatagattttttgaccgaaataatctttaaatttagatccttttcctataattgaggtattcatcatttataattttttcattgcttaattctaaacatttgttgtcaatgataaggaacttgatatgaaggtaatatagtgtcctatatggaggaccttgacatggacttcatggagtagtctatggttcaagttggaaaagtgggaaccttgatatggatttggtggagtggccagctgtttgtcaggagaaaattttgtttttcatttcttttattttgaataataaaaatttgatagtttaaaattaattatgggttgaaattgcaagtaatagaatatttgaattttataatgcaagactttttgttatttacttaacacaagtgtaacgaaagaattgatttaaataatagttaaaatttgaagaagaattaagctaaatttaattaccttttatgtaactaaactactcaaaatattaaaaaattattaatattttcttaaatcaaaattttcattgatttaagaaattctatacggtaaactaaaataaaaaatatttattattttagtatttggcataagaataaattatatttctttgtagattgtttaagttatcgtatgattttttttagaatattatattgaaggtgaatatttttatgattgtttaaatttgacacttgcaattatttaaaaattaaaattatgtttctcctcttatttaagttgataacttgtaaaaaatataaaatatgatactgatttttttgagaaaaaaaagttaatatatattttttttcacacttctttttatacaactaattaatttttatacgataaagaaaataatattcaagtttgaatacaattagaaatatataatacaacaacctttccaattgatgaaaattaaatctaatctttttttcatatataagagaatattattttgtgaattgaaaaattgatcaaaattaaataattagcttggaatgaaataatcttttttttatagatttttttttatccgaaatagtctttaaagtacaccctcttcctataattgatttattcatcaattatattttttttccttgcttgacttaactagctcgcaacatttgttatgaatgacagggaacttgataggaaggtaatgcattgacctatggttaaagttgaagaagaccataacatggctggactttgtgaagtgttcaaaggttcaagatgaataaatgaaaaaccttaagatgacttgatggtgtgggctatgggttgggatatcatgaaatagtacatttgttgtcaatgacaggaaacttcatatgagcacaagaatgttagaagataattttcttttacattatttttgtaaaaaaaactgtaccaaaaagaatgtttcttattttagtattgagcacaagaaaaaatcatatttctttttaccctatcatatttctttgttatttatgcttaatttttcgtattctaagaattaattcgggagaattggataattaagtcgataatttaaaaaagccagcgtaaaaaaagaagaagtgaattaaaattttaaaaaaggatatgtcaaaaataaaatttcctaatttttttttaatttaaaccgttctaagaagtgaattaaagttttaaaaatatattttagtatttggcacaataataaaaaaaaggtaaagaaaacaatgaaagggaagaaaaaaacaggcagggcagcagtataaataatagaagttttatgatttatatgcagaaccaagaagcacttatacaattaagctgtttcatatatccttgagtgatcatgaattcctccatttatattcttgtctttgtccagctttggttgttgagcttaccatgcagagagagtgtgtgcatcccaagtgagcgtgagacacttttgaagtttaagaataatctcaatgatccttcaaataggctttggtcttggaatcataatcataccaactgttgccactggtatggagtcctctgccacaacgtcacttcccatcttcttcagcttcacctcaactcttcaccttctgctttcgatgactggggagcttataggagattccagtttcgtggagagataagtccttgtttggctgatttaaagcatttgaattacttggacttgagcggcaattatttccttggaaaaggtatgtcaattccttctttccttgggacaatgacttccttgacttacctcgacctctctcttactggattcatggggaagattccatctcagattgggaatctctccaatttggtctatcttgacctcggaagttatttgtccgagcctctgtttgctgaaaatgtagaatggctatcaagtatgtggaagcttgaatatctttatttgactaatgcaaacctatccaaagcatttcattggctatacactctccaatctcttccttctttgacccacctatatttgtcagactgcaaactccctcactataatgaaccatccttgctcaacttctcatctctgcaaactctccatctttccttcactagttattcccctgccatttcttttgtccccaagtggatattcaaattgaagaaacttgtttctctcaaattatggggtaataaattccaaggtcggattcctggtggtattcgaaacctcacacttcttcaaaatctttactggtctggaaattcattttcatcttctatacctgattgcttatatggtcttcatcgtctcaagttcctgaacctaagggccaactacttgcatgggactatttctgatgccctgggaaatttgacttctcttgttaaacttgatttgtcatacaatcaacttgaaggaaacattccaacttctttgggaaatttgacttctcttgttgaacttgatttgtcatatagtcaacttgaaggaaacattccaacttcattgggaaatttgacttctcttgttaaacttgatttgtcatacaatcaacttgaaggaaacattccaacttctttgggaaatttgacttctcttgttgaacttgatttgtcatatagtcaacttgaaggaaacattccaacttcattgggaaatttgacttctcttgttgaacttgatttatcaggtaatcaacttgaaggaaacattccaacttctttgggaaatttgacttctcttgttgaacttgatttatcaggtaatcaacttgaaggaaacattccaacttctttgggaaatttgacttctcttgttgaacttgatttgtcatatagtcaacttgaaggaaccattccaacttctttgggtaatctctgcaacttaagggtgatagatttatcatatctcaaactcaaccaacaggttaatgaacttttagaaattctagctccttgtatttcccatgaactcacaaatcttgcagttcagagttcacgactttcaggcaatctgacagatcatgttggggcatttaaaaatattgagcggctagatttttccaacaacttaattggtggtgctcttcctaaatcatttggaaaactttcatcattaagatatctcgatctgtctattaataagttcagtggaaatccatttgaaagtcttggatcactctctaaattgtcatctcttcatattgatggcaatctttttcacagagttgtcaaggaagatgatcttgcaaatcttacaagcttgacggagtttggtgcatcggggaacaatttcactttaaaagtgggtcccaattggattcccaattttcaacttacctatttggaagtgacatcatggccgttaggtcccagctttccattgtggattcagtcacaaaacaaacttgaatatgttggactatctaacacggggattttcgattctatttccacacagatgtgggaagcactttctcaggttttgtatttaaacctctctcgtaatcatatccatggtgagattgggactacattaaagaatccaatatctatcccaactattgatctaagctcaaatcacttgtgtggtaaattaccctatctttcaagtaatgtgcttcagttggatctttcaagcaattcattctccgaatccatgaatgactttttatgtaacgatcaggacgagccaatgcaattagaatttctgaatcttgcatcaaataatttgtcaggagagatacctgattgctggatggattggacatctcttgtggatgtaaatttacaaagcaaccattttgttgggaacttaccccaatccatgggttccttggcagagctgcagtctttacaaattcataacaacacactctcaggaatatttccaaccagtttgaagaagaataaccaattgatatccttggaccttggggcaaataatctttcaggaactattccaacatgggttggagaaaacctcttaaatttgaaaatcctccgccttcgatcaaacagatttgccagccacattccaagtgaaatatgtcagatgagtcatcttcaggttttagaccttgcagaaaacaatctgtctggcaatataccgagctgtttcagtaacttgagtgccatggcactaaagaaccaaagtacagatcctcgtatctattctcaagcacaatatggtaggcgttactcttccacgcaaagtatagttagtgtgctactatggctgaaaggaagaagagatgagtacagaaacattctgggtttggtaacaagcattgatctgtcaagtaacaagttattaggggaaataccaagagaaatcacatatctaaatggattgaattttttaaacttgtcccacaaccaatttattggtcatatcccacaaggtataggtaatatgagatcattacagtccattgatttttcgaggaatcaactttctggtgaaatccctccaaccattgcaaatttgagctttctgagcatgctagacttgtcttacaatcatttgaagggaaaaattccaacaggaactcaattgcaaacctttaatgcctccagctttatcggcaacaatctatgtggtccaccactgcccgtaaactgcagctccaatgggaaaacccatagttatgaaggaagtgatgggcatggagtgaattggttttttgtcagtatgacaattggatttattgtgggattctggatagtgattgctcctttgctgatttgtagatcatggcggtatgcctattttcatttccttgatcatgtgtggttcaaacttcaatcttttcgctcaggtattatcactgtttagtgttgcttagaatactccgatgttttatcattgtattggcaggttgatcaatttgtagtcattgctatcttctttttttcaaatttaagagccttatttaaattctgttcaaataacaattaatactgttatttgaacaacatagacattatcttcattttttttccttcattttttaattatataattgcattaaatatttatatatatatacaaaactatcatctatataattctatttctattgaacatgatagattatctttaataaaaaaaatacttgtgatttaaaaataaaaaactataacacaacatcaatttttacattgctaattaactaaaaataattctaatttttatcattgaatgcatgaattatattgtaacaaaaacaaattgatctaatattgtatgtagttacttttgttttgtaattatttttatcttttatgaatacgcatctaaaaaacattttcagaactgaacacacaaaataatatatgattataaattgtctaataaattataagttttgtctttcatgtatgcacaggtgtgtttcttcccaaattgtgcaaatgctggtcgacaaatgggtgagatcaaaagctcaggtatggtggctgcagaacctgtgcactctcttcaatttctccacaaccttttgatgatgtagatctctcagatgaacctgccgttgctccattcccgcaatactaagtagtagtatttttcttaatgctagcaagaaataatttaaatgggtgtattttgatgcttaatgcgtgtttagtttgtaataaggatgttgcgctacacaccaatatggaatgcgtcattaatttatgtattctgttttgtacaaaattttaatgctggaagtggtctctcggactcttcccattgaaaaccagtgtagccagctttcattatttttggttaatatatatagattgttctttagtactgattggtctgaatagagtaatagattctaattctttaaatgaatggttaagaatttgaattttatcaacttttagttcttcatccttctacgaattttattattagtatctcaattatcttttgggcggtcttaatctatatttctgtttgtcattgcttagtcactttcataaaaaaaaatcactgttaaacgatgtaataatcatatgatttctcacttgggttatgacctaaaaatcatgtgatgaaattttaaggtattacaaatattttgtcagcgtaaaactgctaaataaataaaattttgacaaaaaagaagaaaaaggatgtataataaacaaaatcaataattcacaatacacaaattaaccttttagcatgttattattatatcaaaacctttttttttttggtacctttcaatttgtcattcaagtctagaaggacctatgtgtggacatctaaaggacaccatttatgggtgaaaaatttcaaaatttgtttatcgtacagagcaggattttatataaatatataagtggagttacaattatcactgcgtgccatcaatgttattcacaatacccatgtgggtagaaaattaggaaatttcagaagtattttttttaatggaaaaataattttgttatacaaatatataatagaatcatatttttgtgacattgttggggacataagttttttactacaaaactgtattttcgttattataataaaagggatgtaaagtgaaatgcaaccgagatacaattctattattgttataataaaggagtgtaaaacaaggtaatgagaaaaggattttattttaattattgaatatacacccaatataatcttgatttcgtttcaatttaattattttacaacccctttattccgtgtatattttaataaacaaaaccatgtttccatttagaccattgtcaccctccatccctttcaagtctttcttcttgctcccttaacttgcacatcccctccccacttctttcattttcagcaagcgtcacacaaatctctgccactcgtggcgcaatgccatctctacactgtgcagcaatctgactcaaagaaaaaagtggagtcgtcatcatctgaatagctcaagcaacttccatggtggtggcatctcactctctctaccttccttaaccagaaatggaaaaataactaaaaagaaaagaaccataaccgcaacacacaactgcaaagaacaatagtagccccatatataagtgattatatgtgtgatacaacaaaatccaggatagataaaacaataacccataccaattatacaaattacaattaagttaattattatttttacatattttgatgtacaataaatagcaccaacacaacaatgttatatttactaatatattttttaatattaactattttaatacaattaatactgttatttgaacaacatagacattatcttcattttttttccttcaccgtcttcacccatctttctttgttataaaaaatgtaacaattacagtaaaaattaatttcttatgaaacatgcttcatttagcttattttaaaaattaatgtaataacatttttatcagttgtaaataaagaagagtatttattctaaaaattaagaattatataaacatacacttagtattggatatgactttacactccatgtaaaacaaattcaataaacgacacctgaatcttttgttcataaatttagggacattacatgaaaggtgcatagatttttctagtagtgtcacagtcctactattgtacgtatcccgctttttactccttttcagaatgatagataccaccacgctttttgtttctggttctatactcctttcaggacagattcctccatgaacagtggtatttggccaaagagagttaagtaggtacgtataaaaaacaattcgacacgcaaatttccaaacagagcactaaattaaatggaaaatataacataccaggatataactaaatttgggtttaaacgcgggtgatctaccactgactaataagattttaaaaaacagtttgccattgcaatttctacttgatcatgatttactaaacatattctttgaggagtcttcgtaattgcaacatgacaataattaattatgcctgtatcaattatatctgtccctagtattttccaatacagaaagtcacgagaaaactataacaactactgtggccatagtttaaaagctacattgacgttctaaaagtaggtgaaagcatgcaggtgatgcaacacaaaccttggggtggggtcgatccaattcagatggctatgactaggaggatggtctagctataggcccaaaatgtttgaactttgaatctacatttgggcatatatatgtgtactcttccaatacaaaacaattattttatatttttatcatttaatattcagtctctcttttacactattaatacatagaccttgagtgagtttatcagatgtgcatcaagcatttttttttctgtggccgtgcaagatcttttacagttgctgatgtgtgtaattataaccaccgccatgattggtatgagcctctgtctaatgttaaagtaaagcttttctgcctttgatgagtatttaattgactcaatataattgttgtagatataaacaattgtacttcattataaagagtttttatctgcaatttaaataacacgtttaatcgtaaagtaaatagtatatacgtactccgaacaatggtggaaacaaaactaacaatgatcgacatggtagttatcggactaataatttaatattatgaataacacaacaattgattatgggggaaataaaataaagtaaaaaaacttgtgtaaaagacagatacactttgataagggaatctaaattgtttaacaaaacatgaaaccatattcgacttagttggaattacagttagagtaacatgcaagtaactttgttactttgattttgatgttactccacaccggaaaaatgatatagtaacataacaagcataattaattagatttctttattttacacaaagaatcaatttttaattttgttatatgttgtaatatatactttataatatcaagagtctaatccatttgattcaacagactatacgtgagctgttagaatcaagaatttaaaattaattttattcattgaaaaatcattgaaccctaatcgatgaggtttaatcgttagtggaagcagagaatggagaatggagacacatgagatgatgcaaggaacaaaagtttatgcaagtgctatcaaccgacatgttggattgatgggcttgtccactgggccactgcatggtcaataatttttcctactccaaaagtgttaaatcctctcatgttattgtacccttagtagttatttgtttctgaccgagtctctttagtgtccaatttgctgatgtgaagggtagaaggacccaatgacaatgtcatcaaatttgaaaaaaaataactataaaaaaacaaaaaaaaacatagaccaaaacactattaaacactaaataaaattaaatatgtttttatctttaataaatactcaaattttatgtttattttctaataaattattattttacgtcgagatcctaataaattaatactaaatgaaattaaatattgatattattgttgttcttctacctccaacgttggttggctcgatatatgtgtgtgcttattttaacgttattagatgctacttgtttatttcgtacgttattgttgtctgaagcatagacacgttgtggaattccttagaaattgttaggaatggtgtgtgagaatttcctcggcctgaggcatacgcatggttgaggacacgacaaaattaacacattgtcatttcgtcgcttagccaactatattcgtgtggccattaaaaacgtttctcacttactcttttacccattaattattcacaagttaaagtcgcacgcagtaagttgctaccgacaaatatattcagagttatgatatttagacattcaggtttattgtaaaattaaggttatagttatcaaaatcttgcccataacttagtatttctatgttgtggaaatgatgctaccttggacattgtcttccctgattggtccttctggggatggtaagctacgtactaagccaacttcactccttttttcttcttcctacacttcaataatatatatctcgatctgcctattcttcttgtaaattttgaattagataatccataatgttaaaaattaacttagtgcaatttttgttgaacatgtttgtattttgaaattatattttaaaacggaaaattgaaaaatcacaatcagccctaacgggaccttaatttttaaacaagtaaaaagtattgcatgtgtggtgcacagggcagagattaatataaagccatggcatattttgttgggagagttgaaagaaggcactacgaggataccatggctgaacagagagccttatgcttactggaaaggtaatccagctgttgctcaaaccagataatatctcatgaaatgcaatgtttctgaaaatcaagattggaatgctcgtttattggcccaggtatcacacttcttattagttttgtttgattacacttattgaaagtagttttattatttggatatgaaaaaatttattttgtttgtaatatttcttataagcaaaagtttcattatataaaattggcttaagcacatggtgtgcagaaactagaaataacaggcaaattcaagcaacacaatccagtagcaatattgtgtataacattatacacttttttaacttttaatcttttattaatacacaacttaaaagtacattcaaaatcaaaagaaataacctgttattgaacattactgattttttcctgctggacaatatattttgtctgttaattgactcacaataaagccacatatatagcttccttcttgacaaatgaaaattttgtttcaggattggtttcgagaattacaagaggggttcaacaaatcagacttgccaagtcaatgcacttataggtataacattcaaactgtccattcatgcttcagttataattatatgtaatactatatttttgttattggatacatatgttcagtttatcaataaataaatgttttaattcaatcatgatcgtgcagatataagatgcacattgaaggttctgcttggtcagtcagtcaaaaatacattctgtcatgcgactctaccactctacttgtaaaacctaaatactatgatttttttcacgagagtactgattccagtgcaccactattggcccataaaggacgatgacaagtgcagatccattaagtttgctgtggattggggcaataatcacaagcaaagggtaattttgaagttttgcttcttcactaaggctagaatataattcttacaaagttatttaatcctaaaattaaagaattcacctcagaatatttgatttaatggtgaatcacttaataataatcagggtcaaacctgactacatagttataagcaaatcaatgtttaacttgtcccatttcatttctatttgtgaaatttatcaggcacatcaaattggcaaggtggcattcaagaagaggtaaagtgataggaagaagaacgtacgtgaggaagaagcaagaaggacgtacatgagaaagaagcaggagtgtccatctggcatgagggtagtgattgtaccaaacatgtctgccaccactcctattagcactagtaatttgttaggatttctgttataagaatattctagtatatcagccaagttctctatatatatggtggtgggtgtaattcagattatggaaaagaatattgcccttaccttgaattgttcttcttcttccttctagattttttgaaggtgctgaccctcaaagttcagcaacaacccctgcacgtaacataaagatggactacgtgtacgactacatgtttcatctcctgaattcatatgctaaactcttcagatacaaaccctccataagtgctaatgctacagaactatgtgtggagtcaatggtttgtggagcagaaggatcagtaaagaaatttatgatggaatcattggtcaaggttcctgcaaataccgacccttgcaccatgcctgccccttttgaccctccaactttgtatgcaacattacagagaaaggaaagctcaattcaacaagttgaatcatgggagaaaagttattgggataatcaaaccataacatcttaatgaatatttttttttccatattcaacttaactcattcattcttagactatcttggaaggatacaagtagaatctagattatcttgtacttggctaaagaaaccatatcatgcttgacgaattatcagttttagactttacgaggaaaaaaaaatttgtttgttaattttgtaaatatggataccaaaatgtaaaatttgatatcaattaagttaactaatgaatcaaatttgtaaaatttgaaaatatggaaacgaaccgagcaattgaaaagtgggataccaaaatcatcctcaagtgtacttaaaaaaaaaaaataagattttaatttctattacaacaagtcgttatttcttattagagataaaagaattttaggactgaacaataagatttgtgtaacaagcatttagttgtatgagattaaaggcaaaatgctcacaaaaataaatctccaataaggttttgcaataatatctattgtgagtctgtcagagatttaatacactcgagtgtaaatatttttacactatcaactaatcaatggtttacgtttcaacgtgatatgagaatggtaatatataggtagtatttgagttaagctcatgaaagccaaattagaagccctgcaactgcaaccaaactttctaacaatctcttccgatataagacgcactattcttcttagctgtggccgtttcatctgtcccctggtttctaccattctgggaacttccttcagctgaatgcacaaaagaacacattaaaagtaaatgcaaaatttagtaccattgaaactcaaatgtcaatgtcaaaaataaattctaaaaatgaaatattttgttgaaaggatcactaccagaagtagtgggcgaaggactgatagaaccaccattggatttctgacagaatttgaggataacagaatttgggaaaagcactatctctgtcccctaactaactgcagtgcactaatgctgtcgcggctaaacctaatccctgaggtgagtgggtctgttgtgtggagaagaaatcagcttgttgctccaattaattaatgttgtagaaaaaaggtgactgaggaggatcaagttttctcagggtatcttctttttttgtatttgaaaaaacacaaatgacatgaggaacagtcgttaccttctgctacattttcttttttattatggaagacaagaggcagatctttagcctctctctctctctctctttttttaagaaacacaacagaaaatgaatatatatgacaagtgttaacaatttgtagtcctggctttcgtatactgattcttagattcatacatgcattcggatgttggagcttggtcttagtgcatcgttaattaattagtagtaataagcttaaattatcatttttgttttcttataattttaactttctgatttttgtccgcctatttttaaatcaaaacattaagtttttttttgttttttttaataaataatctttgtctttccatcattgatctttgaccactaagacatttattttatttaattgattttataaatactattttatatgtattattagtcaaaatttattaatttttttttaattataaaaatttataacttaaaataaaatatttaatatttaaatatatttaacatttcattttacatgtatttaaatagttaaactttcgaatgacttcgaagttgtgttttgtttttcttttttacctttaaagtttttaattttagatttttatttatttatttgtattttcattttttttgtttctaatttttccaaaaattataaataattttatttatttaattattaaataaatatttatttattcatttaaaaaataaaattctatagcattatttaaaaattatatcaattttaaatataagaaataattaaataaaacaatattagaaaacataatatattttaaataaaaaaacattaaaaatatataacatattaaataatattgcccttaggaatatcttgggaggatagaagtagaatctagattatcttgtacttggctaaagaaaccatatcatgcttgacgaattatcagttttagactttacgaggaaaaaaaattagtttgttaattttgtaaatatggataccaaaatgtaaaatttgatatcaattaagttaactaatgaatcaaatttgtaaaatttgaaaatatggaaacgaaccgagcaattgaaaagtgggataccaaaattattctcaagtgaacttaaaaaaataataagattttaatttctattacaacaagtcgttattacttattagagataaaagacttttaggactgaacaataagatttgggtaacaagcatatagttgtatgagattaaaggcaaaatgctcacaaaaataaatctccaataaggttttgcaataatatctattgtgagtctgtcagacatttaatacactcaagagtgtaaatattttttacactatcaactcatcaatggtttacatttcaacgtgatataaaaatggtaatatataggtagtaattgagttaagctcatgaaagccaaattagaagccctgcaactgcaaccaaactttctaacaatctcttcccgatataagattctctgttcttagttgtggccgtttcatctgtcccctggtttctaccattctgtgaacttccttcaactgaatgcacaaaagaacacattaaaaataaatgcaaagtttagtgctactttggctgaaaggaagagcagatgagtacagaaattttctgggtttggtaattaacaagcattgatctgtcaagtaacaaattattaagggaaataccaagagaaataccagatctaaatggattggattttttaaacttgtcccacaaccaattgatcggtcatatttcacaaggtattggtaaacatagtgatatcactatgtttagtataactaaaaaaaaatagttgatagctgaaaattatcttttttaatcatacatgttgtaaaattatatgataaaatagttaaaaagtataaaattacataaagaataaagtaataaaatatatgaaaacttgtggtctaataattaaataataatgtcttggggtggaccaagacatgaacatggcaggactttgtggagtgtccaaagggttcaagatgaaaaaatggaggaccttgaaatggacttgatggagtgggctatggttcgtttagaagaaaattttgttttccattatttttagtttgaatattgcaaatttgataatttaatattaattatgcgttgaggtatcatgaaatagaagacttgaatttttttaaaaaaaaaaatgctggacttttattgtttacctgacaaaagtttaaggaaaggagttaaaatttgaagtttaaagacgccaaattttcatttaagcagttctgtagggtaaattaaaataaaatgattcagaatgtttctttttttagtattcagcacaagaataaatcatatttctttttagattatttacataatcatatgaatgaattaattcgggagaattggatagtggcaaatggtaaagnnnnnnnnnnnnnnnnnnnnnnnnnnnnnnnnnnnnnnnnnnnnnnnnnnnnnnnnnnnnnnnnnnnnnnnnnnnnnnnnnnnnnnnnnnnnnnnnnnnnnnnnnnnnnnnnnnnnnnnnnnnnnnnnnnnnnnnnnnnnnnnnnnnnnnnnnnnnnnnnnnnnnnnnnnnnnnnnnnnnnnnnnnnnnnnnnnnnnnnnnnnnnnnnnnnnnnnnnnnnnnnnnnnnnnnnnnnnnnnnnnnnnnnnnnnnnnnnnnnnnnnnnnnnnnnnnnnnnnnnnnnnnnnnnnnnnnnnnnnnnnnnnnnnnnnnnnnnnnnnnnnnnnnnnnnnnnnnnnnnnnnnnnnnnnnnnnnnnnnnnnnnnnnnnnnnnnnnnnnnnnnnnnnnnnnnnnnnnnnnnnnnnnnnnnnnnnnnnnnnnnnnnnnnnnnnnnnnnnnnnnnnnnnnnnnnnnnnnnnnnnnnnnnnnnnnnnnnnnnnnnnnnnnnnnnnnnnnnnnnnnnnnnnnnnnnnnnnnnnnnnnnnnnnnnnnnnnnnnnnnnnnnnnnnnnnnnnnnnnnnnnnnnnnnnnnnnnnnnnnnnnnnnnnnnnnnnnnnnnnnnnnnnnnnnnnnnnnnnnnnnnnnnnnnnnnnnnnnnnnnnnnnnnnnnnnnnnnnnnnnnnnnnnnnnnnnnnnnnnnnnnnnnnnnnnnnnnnnnnnnnnnnnnnnnnnnnnnnnnnnnnnnnnnnnnnnnnnnnnnnnnnnnnnnnnnnnnnnnnnnnnnnnnnnnnnnnnnnnnnnnnnnnnnnnnnnnnnnnnnnnnnnnnnnnnnnnnnnnnnnnnnnnnnnnnnnnnnnnnnnnnnnnnnnnnnnnnnnnnnnnnnnnnnnnnnnnnnnnnnnnnnnnnnnnnnnnnnnnnnnnnnnnnnnnnnnnnnnnnnnnnnnnnnnnnnnnnnnnnnnnnnnnnnnnnnagagaagagaactgatacttgcttattgtcattattcaaaaaagaaaaaaggttaaaaagaaaagaaaagtgagtgggaaagacacactcgagtcgagcgggagtcaaagctggaagtccaaagtttctggaactcaaactagtagtgtgggtgtggaacaggacaagggggtttctgtgaaggactatttggtggacaaactgaggcctggtgatgaagacagggctctctctgaagtgatatcagagactctgcacaagaaggaactgcccccagtggaagttactgaagaaggtgtgagaaaggtggtttctgatgctgtgcataagagagacgatgatcctgagggaaaaatggaacatcaaagaatactgggaaaggtaactgagtcagaggaagtgaagagaaggttaggaggtgaaagtgtggtgacagagaaaaagtaccaagagatgtatgtgaatagtccggggaaaggtgtggttgataagcttaaaggtatggttgggacatggtttaccaacccagcagagaatcaatcttcacaaggtaaataacaatgaatagtagctctagttgtctccatgaggtttctcttgtttgatcaatgccttttgaaaattttacttatttctaaattagttgattgtattcttttaccatacttctctgactaattcttttgttactcttcacattctgcttgagttttgcagctagacaaagatattttgtatcgatattaaaatttattatctctctatttgtttattatatttgccttgtaacagtttttcgattttcttatcttggaagaagtgttttgagaaacaaacgaaattatgattatgtatgtttctgttagtcttaagacttgattccaagatggatcgcagttatttgtttacttgttttggtcatgcttacatatttttctatatgtttcttttttttttcattttgtaagaactgtttaaaaaaaagtggagtaatttttatcctagtggttttagacttcagtccaagatgagttacaatttttttttttactttattttgggtatgctattttttactgaagcaaagtgccacattaattttgaatttgtggtttgcatgggccgaagattcatctatgaattatgaggcaggaagggcagaagtggaacaagttaaccaaggtgcagcaggtgaaagaaggcagcaggagtcatctaattgaagaagtgctttgaaggagtctttgctttgggtgattgtgtagattttcttaaaagctgtttcaatatctgtgtgtctagttctttgttggaagaaagttaggatgttcaagtcacagtaaactaaaaatttgtgtttttttttaatgtttatgtaaatatccaattttattcgggtttatttttatattttatataaaaatattaaaaatattttttgagaaaaagaaaagagaaaaattatagaagatttgacagttacaagaagacttggcatcagaaaactgtagtaatggtgattcaattgagaaaaaaaaatattactaaaagataagatcatttaaaatatttttgagaaaaaagaaaaaaagaaaaattatagaagattcttttaaataaaaataattaaaatattttagagagagaaaaaagaaaaatcatagaggatctgaaagttacgaaattgatcatcagaaaactggagtaatggtgattcaattgagcaaaaaataaaatattagtaaaagctaacgtcattgaagttgtaagtctaaagacaaggagatcgtggtataatggaatcctaagttgttgttggattttaaaagaagagacgcactagcatacaaggagaattctgtgaagggaaacccatagaaagattgttttttcgcaattttttcaatggatgattatgatgctataagatcaggtctttgttctttttgcgctctataagatcaggtttgtttgttttttttttcttttctctcgttcatttgttgttatgtttggctttttttatttaatttttggtttcatgaattcgtgtatgtatgctatccaaatgtttgttttttgtataaaataagtatacacatttcgaccgcatgtttacattcatattgtgggttaaaaagcatattttttacctgcttattggtcccgataaatttccgtatataaaatagtaagatcgagtgtcgagtttacaagaactttaactgtatccagagtttgtatatgttcaattttaagtagtcaataaattaaaattgatatttgtcaaataatgatacggaatataaaatttgacataaatgaagataattaagcatagtacattaaagagatagaatacaaacactcagaggtgggttgtcagttgaagtagaattacagaatatgttgagactcaacctatcaaaattactcttgatgcaacattaagggttttttactatttaacgttattttgattattaccttcatccactaacataccctaatcatgatttctcatgtgaaaaagtttaaattaccaaatttcactcctaatcccttaagagctatatgaaataatttgctttaagaataaagatgtataataaataaggtaaaataatatcattctattcctaaacatgaattacctagatgttcttttcaagttcataggaaataaacattttccaatgcataaaccctataacactacatgagaataggtaatcaagctataaacatgatattaagcacagaaaagataataatattaaaataacattaaataaatagttagaatcattacatcaagagtgtttaatagttgaactcccaacaatgggtgatttagcctctcattgtcatgagagggttactaatacaaaaagaaagcaagaggtgtgaaagaaaatggaggaaagggtcccaagtgaatggattttctctcttctctcatgtcttggcttctcaattttggtcccactaaagaattgcttgatttttcctttctttttcctttaaaatgaagcacaatcatgttttgtgatattgatcaagcgctaagccagcatgtgctcgcgaagcgcacatgcaaagtccatctgacataagtgaatgtgcgttaagccgcaaggtgcaggctaaaccgcagatgcgtactaagccgccacatacaggctaagctgtagatgcacactaagtcgtcgtatgcacgctaagcatgacctccaagttggctcctcgcgttgagcggttgttgacgcgctgagcgagctgctccagttcttcaaccatattgcagacctcctactgtgtaattctataaaaaaaaatacactaaaaaatactataaatttgataactttagcatttattggacaaaaactcagaagaaattaaatttctaatgttctaacacaaaagaagcaataaaagagaggaaaattagataattgttatgtgatttaaacatttaaattacgtaagcatatcaattaacagattatacgtggaaaaaagtttttttaaaataaaaacaatgttgtatttgcccatttcttctctctcttatctatctctccatcacccttcatcttcctcatatcccaccactgtgccactgatggtgtttcattttttccctggtggttggactaaatgaaaacaaaatagatgaaagaatagatatgaaccaacaaaatcttaatatcaaaacattaaaccacaaaatcgagaaaagaacaatgtttggttggcttcagtaggtttcatggctggattcacatttggatttcatgtgggatttcacaatgaggtttgttgtgagttggggctcattgggttttgcaacggtggtggcagtggagatcacagtcgttgggttttatgaccggttgcgattgagatcatagttgggttcctaccaatatttctacactatgaataaagataaagaaatttctacactatgaatatttgaaattaattaagattagctaaattcatctaaataacaatatgcataaagataaagaaaattaaggaaggaaataaaagaaaaaattaagggaaaattttttgtttgggaattttaacaaacacttgtgtatgcaaagtaaattgagattaaatcaatgaaaaaattgttcgggtttaattttattggagttcatatcacgtaatcactacacatttatatttaataaagattatattatcattaacctaccatattatcttaactttaatttcttaagtgaagagagctaaatcccttgattaaactatcaatcctttggattagcataatcaaacaatttgcattaagacaaagtgtttattgatgctcaactatccctagacataaaaattattgggtgttctatccaattcgcaacttaatggaatttttctattacaattgaatgaaaaatcatgcaaacaggtgcaagccaaaaacacatattaggcataaaagagaaacaattacaatgttttattgaataaaaaaaagtagttattacatggaagaagaaacaattacattaaactctaagagaagattagttcatgacaataaaaaaacatgagatatacatcacataaatgtcttaaaatgacacaaaaatctaagaatacatgataattattgatcatctaaaattaacttaggataaaaaaaagtaacatattaaaattttataggaatgaaaatgatatattttagtctattttttttaatgcttgacataactctcaacatttgttgtcagtcataaaaaaactttgacatggttttgatggagtggcctatggttcctgttgaaaaagtggggccttgatatggatttggtggagttgtctacggtttgtctagaagataattttttttcttttattttattttgaataataaaaatttgataatttaaaattaattataatttcaaattgcatgtaatagaagccttgaatttaataatgctagactttttattgtttacttaacacacgtgtaatgaaaggattgatttaattaatggttaaatttgaagactcattattaaaccaaattttattacctttattgtaaactattaatgttttttataaaaatattaatatttacttaaaataaaattttcattaatttaagcaattctataagttaaacaaagaaaataaaatgtttcttattttagtatttggcacaagaataaattacatttctttgtagattatttaagttatcgtatgaattattttttaagaatattatattgaagtgagtatttttatgattgcttaaatttggcacttaaaattatttaaaaagtaaaatggaaattaaaattatgctgctcctattatttaagctgacaacttgtaaagaaaataaaaaatatgatactaatttttatgataaaaaaataataatattcaataaattgtatatttatttttctcttctatcactattcttaaaatatcaccacataagtaaatgaaattcaggaaaagattttaatatatgaagacttgtggtctaaaaattaaatagctaggaccatagataaataatttcaaaaacatgccacacttctagtagatcatatcctctaatttacattttaagttaaatgtgatctacaatacgtgaagaaatttggaccaagacttataaaaggaaaaactatgattcaataattatgatagaccaagttaaacaagcattttacatttttttgtatctcactaattaatttttaatgaaaaagaaaatactatgcaggttaaaatacaattagaaatagacgacataacaatttttccaattaatgacaatgaaaattagtcttttttcatatataagaagaatattattttgtgaattaaaaaatggatcaaaataaaatagctagataggaacgaaatagtctttttttatatagattttttaaccgaaataatttttaaattatatccttttttctataattgatgtattcatcattaattttttccttgcttacttaattctaaacatttgtagtcaatgataaggaacttgatatgaaggtaatgtggtgacctatggttcaagttgaagaagtggggggacattgacatgaacttggtggagtggcctatgggctatggatgaagttgaagaagtcagagaccttaatatgggtggactttgtggagtgtcctaaggttaaagatgaaaaaatggaggaccttgacatggacttgatggagtagtctatggttcaagttggaaaagtggggaccttgatatggatttggtggagtggccagcggtttctctaggagaaaattttgttttcatttcttttattttgaataataaaaatttgatagtttaaaattaattatgggttcaaattgcaagtaataaaatatttgaattttataatgcaagactttttgttatatacttaacacaggtgtaacaaaagaactgatttaaataatagttaaaatttgaagacgaattaagctaaatttagttacctctgatgtaaattactcaaagattaaaaaaattattaatatttttttgagataaatttttcattgatttaagcaattatatacggtaaattaaaataaaaaatgtttcttattttagtatttggcacaagaataaattatatttctctatagattgtttaagttatcgtatgaatttgtttttttttagaatattaaattgaacgtgagtatttttatgatattttaaatttgacacttgcaattatttaaaaagtgaaatggaaattaaaattatgtttctcctcttatttaagttgataacttgtaaaaaatacaaaatacgataccaatttttgtagaaaaaagttaatattctttttcacacttctttttatataactaagtaatttttatatgataaaaaaataatattcagatttaaatacaattagaaatacatgatacaacaacctttccaattgatgacaattaaatttagtcttttttcatatataagagaatattattttgtgaattgaaaagttgatcaaaattaaatagctagattggaacgagataatcttttttttatatagatttttttaaactgaaatggtctttaaagtacacccttttcctataattgatttattaatcaattatatattttttccttgcttgacttaactcgcaataattgttgtcaatgacgaacttgatatgaaggtaatggagtgacctatggttaaagttgaagaagtcagaccataacatggctggactttgtggagtgcccaaaggttcaagatcaacaaatggaaaaccttgagatggacttgatggtgtgagctttggtttagaagacaaattttcttttacattatttttagtttgaatattgaaaatttgataatttaatattaattaagggttggaatatcatgaaatagaagacttgattttttctttttttaaaaatattggacttttactgttttcgtaacaaaagtttaacgaaaggattgattaaataatagttaaaattcaaagtttaatgataccaaattttcatttaagcagttctatagggtaaattaaaataaagtgattcttatttatttttgtaaaaaaaaagctgtaccaaaaagaatgttatttattttagtattgagcacaagaattaatcatatttctttgttattaattttttttatgaatttagtgtacataggaattttaaaaaaagagatagatacagtaaatgcataatttttcgtattctaagaattaattcgggagaattggataattaagtcgataatttaaaaaagccagcgtaaaaaaagaagtgaattaaaatgttaaaaaaatattttagtatttgtcacaataataaaaaaacgtaaaaaataatgaaagtgaaaaaaaaggcttaaaatataattgttgtctttttttaatatgttattttagtttttttatttttaattgaaatattttatctcttatttttaaaaaatcttgtaattttagtctttttatttttcaattgagatatttttaaaaaatatgtcattttagtccatttgatcaaattcttgtttttaattaggatattttgtcctttaaaagttattttgaagaaaccaagaaatacaataaattttattgattttaataaaataattatttcctattctaagaattaagtcagagaattggataataaagtcaataattaaaaaaaggaaacgccaaaaaaaaaaaaaaagacacttgcatcagtataaaggaaaccgttctaagaagtgaattaaaatattaaaaaaatattttagtatttggcacaataataaaaaaggtaaaaaataatgaaagtgaagaaaaaaacaggcagggcagcagtataaataatagaagtttgatgatttatatgcagaagcaacaactacacttgttttctatatattcttgtgtgatcatgaattcctcctccatttatattcttgtctttgtccagctttggttgttaagcttaccatgcagagagagtgtgtgcatcccaagtgagcgtgagacacttttgaagtttaagaataatctcaatgattcttcaaaatcttgacttgtctggaaattcattctcatcttctatacctgattgcctatacggtcttcatcgtctcaagtctttggaaattcattccagcaacttgcatgggactatttctgatgccctgggaaatttgacttctcttgttgaacttcatttgtcaaacaatcaacttgaaggaaccattccaacttctttgggaaatttgacttctctttttgcactttatttgtcatataatcaacttgaaggaacaattccgacttttttgggaaatctccgcaactcaagggagatagatttaacaattctcaatctctctattaataaattcagtggaaatccatttgaaagtcttggatcactctctaaattgtcatctctttggattgatggcaataattttcaaggagttgtcaaggaagatgatctcgcaaatcttacaagcttgacagtgtttgatgcatcagggaacaatttcactttaaaagtgggtcctaattggattcctaattttcaacttacctttttggatgtgacatcatggcagataggtcccaactttccatcgtggattcagtcacaaaacaaacttctatatgttggactgtctaacacagggattttagattctattcccacttggttctgggaagcacattctcagcttttgtatttaaacctctctcataatcatatccatggtgagcttgtgactacaataaaaaatccaatatctatccaaactgttgatctaagcacaaatcacttatgtggtaaattaccctatctttcaaatgatgtgtatgacttagacctttcaaccaattcattctctgaatccatgcaagattttttatgtaacaatcaggacaagccaatgcaattagaatttctcaatcttgcatcaaataatctgtcaggagaaatacctgattgttggattaattggccatttctagtgaaagtgaatttacaaagcaaccattttgttgggaacatccccccatccatgggttccttggcagacctgcagtctttacaaattcgtaacaacacactctccggaatatttcctaccagtttgaagaagactggccaattgatatccttggatcttggagaaaataatctttcaggatgtattccaacatgggttggagaaaagctctcaaatatgaaaatcctccgccttcgatcaaacagtttttccggtcacattcctaatgaaatatgtcagatgagtcttcttcaggttttagaccttgcaaaaaataatttttctggcaatatacccagctgtttccgtaacttgagtgccatgacactagtgaaccggagtacacatcccggtatctattctcaagcaccaaatgatacacaattctcttcggtatcaggtatagttagtgtgctactatggctaaaaggaagaggagatgagtatggaaacattctgggtttggtaacaagtattgatctgtcaagtaacaaattattaggaaaaattcctagagaaatcacagatctaaatggattgaactttttgaacttgtcccacaaccaattgattggtcctattccagaaggtattggtaatatgggatcgttacaaaccattgatttttcgaggaatcaaatttctggtgaaatccctccaaccatttctaatttgagctttttgagcatgctagacgtgtcttataatcatttgaagggaaaaattccaacaggaactcaattgcaaacctttgatgcctccagctttattggcaacaatctatgtggtccaccactgcccataaactgcagctccaatgggaaaactcatagttatgaaggaagtcatgggcatggagtgaattggttttttgttagtgcgacaattggatttattctgggattctggatagtgattgctcctttgctgatttgtagatcatggcggtatgcctattttcatttccttgatcatgtgtggttcaaacttcaatcttttcgctcaggtattatcattgtttagtgttgcttagaatacaccgatgttatcattgtattggcaggttgattaatttgtagtcattactatctttttttttttttttcaaatttgagagccttatttaaattctgtttttggatgtaaagagggagagtagctgaacgtaaagaggggaaggataggaggtgtggggaaatgaaactaaggataaccaagtaatttcaaatgctttggtagtctcaatagcatttttggtagtgacaatagtagcccatatatatataaatgattatatgtgtgatacaacaaaatgcaggatagataaaacaacccataccaactatacaaattacaagttaattattacttttacatattttgatgtacaataaacagcaccaacacaaaaatgttatatttactagtagcagtagtaattaactagttttttatatataaaagtggtaattaacaactctttcatcacacatatggacccctccaaatacaatctttttttttttcacagtaaagggaatctgccgtcaattcagttctcactatcagatttaattaaaccactgctctaacgaggcacatatcatgttaataaatatagtattttcaatgaaaaattcaaataaaatatctcaataaataatatacatgcacttacacataaaaatgttatttaaaccctgaactgaacacacaatgatatatgattataaattgtctaataaattataagttttgtctttcatgtatgcacaggtgtgtttcttcccaaattgtgcaaatgctcgtcgacaaatgggtgagatcaaaagctcaggtatggtggctccaggacctgtgcactctcttcaattcacctcaatttctccacaaccttttgatgctatggagctctcagatgaacctgccgtttctccattcccgcaatactaagtagtagtatttttcttaatgcttacaagaaataatttaaatgagtgtattttgatgcttaatgcgtgtttagtttgtaataaggatgttgcgctacacaccaatatggaatgtgtcattaatttatgtattctgttttgtacaaaattttaatgctggaagtggtctctcggactcttcccattgaaaaccagtgtagccagctttcattatttttggttaatatatataaattgttctttagtactgattggtctgaatagagtgacagattctaactctttaaatgaatggttaagaatttgaattttatcaacttttagttcttcatccttctacgaattttattattagtatctcaattatcttttgggcggtcttaatctatatttctgtttgtcattgcttagtcactttcataaaaaaaaaaaaaaaatcactgttaaacgatgtaataatcatatgatttcttacttgggttatgacctaaaaatcatgtgataaaattttaaggtattacaaatattttgtcagtgtaaaactgctaaatatttaaaattttgacaaaaaagaagaaaaaggatgtataataaacaaaatcaataattcacaatacacaaattaaccttatagcatgttattattatatcaaaaccttttttttttggtacctttcaatttgtcattcaagtctagaaggacctatgtgtggacatctaaaggactccatttatgggtgaaaaatttcaaaatttgtttatcgtacagagcaggattttatataaatatacaagtggagttactattatcactgcgtgccatcaatgttattcacaatacccacgtgggtagaaaattaggaaattccagaaccattttattttttatggaaatataattttgttatacaagtatataatagaatcatatttttgtgacattgttggggacataagttttttactacaaaactgtattttcgttattataataaaagggatgtaaagtaaaatgcaaccgagatacaattctattattgttataataaaggagtgtaaaacaaggtaatgagaaaaggattttattttaattattgaatatacacccaatataatcttgatttcgtttcaatttaattattttacaacccctttattccgtgtatattttaataaacaaaaccatgtttccatttagaccattgtcaccctccatccctttccagtctttcttcttgctcccttaacttgcacatcccctccccacttctttcattttcagcaagcgtcacacaaatctctgccactcgtggcgcaatgccatctctacactgtgcagcaatctgactcaaaggaaaaagtggagtcgtcatcatctgaatagctcaagcaacttccatggtggtggcatctcactctctttaccttccttaaccagaaatggaaaaatgactaaaaagaaaagaatcatgaccgcaacacacaactgcaaaggacaataatagccccatatataagtgattatatgtgtgatacaacaaaatccaggatagataaaacaacaaaccataccaattatacaaattacaattaagttaattattatttttacatattttgatgtacaataaatagcaccaacacaacaatgttatatttactaatatattttttaatattaactattttaatacaattaatactgttatttgaacaacatagacattatcttcattttctttccttcaccgtcttcacccatctttctttgttataaaaaatgtaacaattacagtaaaagttaatttcttaagaaacatgcttcatttagcttattttaaaaattaatgtaataacatttttatcagttgtaaataaagaagagtatttattctaaaatgaattatataaacatacacttagtattggatatgactttacactccatgtaaaacaaattcaataaacgacacctgaatcttttgttcataaatttagggacattacatgaaaggtgcatagatttttcctagtagtgtcacagtcctactattgtacgtatcccgcttttttctccttttcagaatgatagataccaccacgctttttgtttctggttctatactcctttcaggacagattcctccatgaacagtgctatttggccaaagagtgttaagtaggtacgtataaaaaacaattcgacacgcaaatttccaaacagagcactaaattaaatggaaaatattacataccaggatataactaaatttgggtttaaacgcgggtgatctaccactgactaataagattttaaaaaacagtttgccattgcaatttctacttgatcatgatttactaaacatattctttgaggagtcttcgtaattgcaacatgacaataattaattatgcctgtatcaattatatctgtccctagtattttccaatacagaaagtcacgagaaaactataacaactactgtggccatagtttaaaagctacattgacgttctaaaagtaggtgaaagcatgcaggtgatgcaacacaaaccttggggtggggtcgatccaattcagatggctatgactaggaggatggtctagctataggcccaaaatgtttgaactttgaatctacaatatttgggcatatatatgtgtactcttccaaaacaaaacaattattttatatttttatcatgtaatattcatctctcttttaaactattaatacatataccttgagtgagtttatcagatgtgcatcaagcatttttttttttctgtggccgtgcaagatcttttacagttgctgatgtgtgtaattataaccaccgccatgattggtatgagcctctatctaatgttaaagtaaatcttttctgcctttgatgagtgtttaattgactcaatataattgttgtagatataaacaattgtacttcattataaagagtttttatctgcaagtaacacgtttaatcgtaaagtaaatagtatatacgtactccgaataatggtggaaacaaaattaacaatgatcgacatggtagttaccggactaataatttaatagtatgaataacacaacaattgattctgggggaaataaaataaagtgaaaaaacttgtgtaaaagacagatacactttgataagggaatctaaattgtttaacaaaacatgaaaccatattcgacttagctggaattatggttagagtaacatgcaagtaactttgttactttgattttgatgttactccacactggaaaaatgatataataacataacaagcataattaattagatttatttattttacacaaagaatcaatttttaattttgttatatgttgtaatatataatttataatatcaagagtctaatccatttgattcaacagactatacgtgagctgttagaatcaaaaatttaaaattaattttattcattgaaaaatcattgaaccctaatcaatgaggtttaatcgttagtggaagcagagaatggagaatggagacacatgagatgatgcaaggaacaaaagtttatgcaagtgctatcaaccgagtgtctttagtgtcgtgaagacccggtttctaactacattatttattaattaattcattttcaaaaagtgcctcataaaaacaccctttttgtggtaatttgatttttaaaataataataatgacatgataactttagaagaaaaagaagtaccaattttttttttttgttttcatcaactggtttgcgtggagccatttttccactctgtgactgtctgacccgggtgcttttgaaacaggttttgctttgcttctttggcactctgcaaccttgtgtactaccaaagccatttgctgccatttttcacatccataatctttcagtgattttcttgtctcaaaacaaaatcctttgaacaatactaagactctaagcagaaacacacacacacaattttattttttttggaagctcaatgttactactatctatctacccttctcacaatcacaaagtcaatgctcccacttaactgttttcctactccaaaagtgttaaatcctctcatgttattgtacccctagtagttatttgtttctgactgagtctctttagtgtccaatttgctgatgtgaagggtagaaggacccaatgacaatgtcatcaaatttgaaaagaaataactataaaaaaacaaaaaaaaacatagaccaaaacactattaaacactaaatgaaattaaatatgtttttatccttaataaatactcaaattttatgtttattttctaataaattattattttacgtcgagatcctaataaactaatactaaatgaaattaaatattgatattattgttgttcttctacctccaacgttggttggctcgatatatgtgtgtgcttattttaacgttattagatgctacttgtttatttcgtacgttattgttgtctgaagcatggacacgttgtggaattccttagaaattgttaggaatggtgtgtgagaattccctcggcctgaggcatacgcatcgttgaggacacgacaaaattaacacattgtcatttcgtcgcttagccaactatattcgtgtggccattaaaaacgtttctcacttactcttttacccattaattattcacaagttaaagtcgcacgcagtaagttgctaccgacaaacatattcagagttatgatatttagacattcaggtttattgtaaaaattaaggttatagtatatcaaaatcttgcccataacatagtatttctatctttttacggatattttgacaatatgacttttttttcaagataattgtatattaattaaatgaatttgataatataaagatgatcgtgaaaagtttacgaaatatagtgtgcgtgagcaaagtaagacatagtcatgtagatgtggtaggtttaacccttgctgccaaagtaaaaaattaagtgggaaacaaaaaaagaagaagaagaaagatagaaaccctcagggtagcttatagttaggagggctcaatatgtctcccttgaccaaacaatttgactaaaacttgaagacaattgaataaggattcaagttttttttattgtcggacgactcaggaaagattcaacattacattttaaattttttatatagttggaaattagtattaaattataagactttttatttgaagtaatatttttataaaatcataatatttttgtgtataaaatttactttaaaatacatttagtaaaacattttagttttagctttataattttaaaaacctaattaagacttaatatatgagaaaaatttgctaaataaaatatgagatcagctgaattttttttattttaataaattttaaaataaaaaataatatattagaaaagtgtgttaacatttctcttgaaatgattagtgtttttgctagcctatgttcctaaccgcaacaggcgccagaaattgtgggttaaccaggcatagagaaattccaaaggttgtgagttgtaagaagtctttgtaaatcacatgtccttcaaactttacacacatcccaaagaagggaccaacgaattcttgactttatgggatcgtgagccttgtagtttcatgcacgtagaattatcttggacccataattttgtcactgttgtacccttacattattcattaaataatgctattttaacggcactcttgttttattctcacttctctctagcttcttaattttaaccatttcaaagcttacgttcccatgcaaattacagcactgtatatacgtttttctagttaaactctggagctacgtgggtgttgtttttatttgatgatgcatatatggtttgtttgaatatttgtggccattgtgtgaaacgtggtgtacatgtagcgtatgttttccggtgcatcatcttccaaatcagcacaaagcaccacgccatatggcacgagtcctttcacagtctccatccggaagccaatagccccgttgaactgcaccgcatacaacctcaccggaacatgccccacaaacctacaagaccatcagagcactccagccaccgccacgtgtccagattacttccgttggatccacgaggatttgaggccttgggcccgtacgggcatcacgcaagacatggtggagagggcaaagcaaacggcaaattttaggtttttttttatcggtcaatattagttattagtttttgttagagaaaaaaaaaagattcaaacccatctgtgttttttttttttatcatcaaatcaactttataacttgtaagaattattttaggttgataatattaaagggtagggcttatttggagacttactcaaggccctatcaaacaagggatgtttttagcatatgggggattctacaattgttgagaaggtaccctggcaagatacctgatttggagcttatgtttgattgtgtggattggcctgtggttttgtctgatcgttacaatggccctaccttggacattgtcttccctgattcttcctacacttcaataatatatatctcgatctgcctattcttcttgtaaattttgaattagataatccataatgtaaaaaattaacttagtgcaatttttgttgaacatgtttgtattttgaaattatattttgaaacggaaaattgaaaattcacaatcagctctaacgggaccttaatttttaaacaagtaaaaagtattgcatgtgtggtgcacagggcagagattaatataaagccatggcatattttgttgggagagttgaaagaaggcactacgaggataccatggctgaacagagagccttatgcttactggaaaggtaatccagctgttgctcaaaccagataatatctcatggaatgcaatgtttctgaaaatcaagattggaatgctcgtttattggcccaggtatcacacttcttattagttttgtttgattacactagcttattgaaagtagttttattatttggatatgaaaaaattaattttgtatgtaatatttcttataagcaaaagtttcattatataaaattggcttaagcacatggtgtgcagaaactagaaataacaggcaaattcaagcaacaccatccagtagcaatattgtgtataacattatacacttttttaacttttaatcttttattaatacacatgaaatgaaatgttaattagggagtggaaagggttagcagtacctcatgtaaaggaaggttcattccaacttcagatgaagttaaacgcaaattggcaaatcgtcgtaaatttctttcagctatacttggaaggatatacccatctatttaatgaaatgtaaattagcaacacaaaataactatgaaaagtccagcacagacatagcacagctcaaatttataattcaaatcactaagaaatcattacatgaccaatgaacaaaatagtctttacttagtagtaagtgctcacagttgtgcacccaggccacccccaaaccacaaaataaattagttgttaagacatgttactataataaattattccactggaggtatgaattgttctattagaatatgtcaaagaagacgaagaacctgttttctctgaaggccactcaaagaatccaacacatatctgctggagtttagtacgttgaaacggatattgagcaagacccctatagagatgagtaaattttaagtagctgacaacagtgctatacaatttatatgccagatctaattcatcaggttacattaaaaataaaattccaattaagaatctcagaagcttaattaaattttaacaaaacatgtgctatcagtaactgtttcaaatggacttcatatctgttttcagaaaataacatttatacctgatcattagtcagtattaagaaccataacagaaaggcatgacctttcttggctagaaagagaatgagatgcgttaacaataccagacgtaaattgactcagttttcgcatgttcggattagtgagtatattgaatatatttcaatcagtattaagaatcaatctttatgagtggaaaccatgaataaaaaagacaaacctacttgtgcacaatatctgaatctgcttggtgacattttgggttcatataagcattaattacttgtaaaatgttatcatccggccataaatcattcttacctcctgcatagacaaaagatagaagctaagatacaatgttcaagagacaccaacaatcctccatttgacaaaaataattattaactgcaagtcaacatttgtgtacaagttgatgcagacaatgcattctagaagacataaaaaaagcacaaagatattaggtatataattccatcctttggtttagaattagatattatattgggtccactgtaacatctctcattgcttaacaatttacatttacatggacagtaatcagttagtgttaatttagcttttttctaatatactaatttagctgatattatattttcagatagcggatataattggttcatgacatgctatcaatacatgcatgattaatagcatgtttgaatctaactccatgatccacattgtccaagaaatttgagtcaaaattttaaaaatgacacaacagcaagtattttttgcttcaatttgacgtgcattcacaacaatgaacaccaaaccaaacgggcactaagtggtctagagtttgatcattgttacccccatttttctaataaaaagtagaatttcaaaacaaggtaggtgagcatttacattatttatgcttcaatccaaaaggttttggtgttttactagtggaaagggacatgtaagagactcaataattcacaccttaaagtttgcatttattatgtacaaatacagttaataacctataaatcaaatcctgatacgtttgttgacaaaaattcttttaaaaacattaaaacctctcttctatgtcaaatattaagtgtattattacataatttggacagataatatgtccctaattctctgaaaagtttacttgtatagtaacactagagcagtgccataaactgttttctagtttgagaaggaaacctgtcagaaaaaataatcaactgcaactttcaattcaagtaatgtgaattgaatactccgaagagggtaatatccccacacttacaagttacaatgacaaatgttgaacatttttcatgtgacatacaaacatttacccccttaactaaaaaaaaaaaagactataaaaaatatcaaattaaattgtagtgaaaaatgaaactattagttttaattaaagaaaatactacttatttattccttccaataatcaaatattttctcattaccaacttgtctcattcatctcttatttactactaattgttacttgtagttaagtgtgttagattcatgggttaacaatgagtcgtgtatgtaattaataatcattaatgtcatatttttttatcatttgaagtggagtattcattttttctcttaatattattttatccttcacaaaattcaaataagatattttatttgagaggatgaattcagaaccactcaaactaatgagttaaggactcttattggttattaacatcgaattaaaactagttttatgtattttgtttttataaattaaagactaatacttgcttattgtcattattcaaaaaagaaaaaaggttaaaaagaaaagaaaagtgagtgggaaggacacactcgagtcgagcgggagtcaaagctggaagtccaaagtttctggaactcaaactagtagtgtgggtgtggaacaggacaagggggtttctgtgaaggactatttggtggacaaactgaggcctggtgatgaagacagggctctctctgaagtgatatcagagactctgcacaagaaggaactgcccccagtggaagttactgaagaaggtgtgagaaaggtggtttctgatgctgtgcataagagagacgatgatcctgagagaagaatggaacatcaaagaatactgggaaaggtaactgagtcagaggaagtgaagagaaggttaggaggtgaaagtgtggtgacagagaaaaagtaccaagagatgtatgtgaatagtccggggaaaggtgtggttgataagtttaaaggtatggttgggacatggtttaccaacccagcagagaatcaatcttcacaaggtaaatagcaatgaatagtagctctagttgtctccatgaggtttcttttgtttgatcaatgccttttgcaaattttacttatttctaaattagttgattgtaagggttcgaatctggaaacagcctctttgcatatgcaagggtaagactgcgtacaatatccctccctcataccttcgcatagcgaagagcctctcgacaatgggatatgctagtttttatttttattcttttaccatacttctctgactaattcttttgttactcttcacattctgcttgagttttgcagctagacaaagatattttgtatcgatattaaaatttattatctctctatttgtttattatatttgccttgtaacagtttttcgattttcttatcttggaagaagtgttttgagaaacaaacgaaattatgattatgtatgtttctgttagtctgaagacttgattccaagatgaatcgcagttatttgtttacttgttttggtcatgcttacatatttttctatatgttttttttttcattttgtaagaactgtttaaaaaaaagtggagtattttttatcctagtggttttagacttcagtccaagatgagttacaattttttttttttactttattttgggtatgctattttttactgaagcaaagtgccacattaattttgaatttgtggtttgcatgggccgaagattcatctatgaattatgaggcaggaagggcagaagtggaacaagttaaccaaggtgcagcaggtgaaagaaggcagcaggagtcatctaattgaagaagtgctttgaaggagtctttgctttgggtgattgtgtagattttcttaaaagctgtttcaatatctgtgtgtctagttctttgttggaagaaagttaggatgttcaagtcacagtaaactaaaaatttgtgtttttttttaatgtttatgtaaatatccaattttattcgggtttatttttatattttatataaaaatatttaaaatattttttgagaaaaagaaaagagaaaaattatagaagatttgacagttacaagaagacttggcatcagaaaactgtagtaatggtgattcaattgagaaaaaaaatattactaaaagataagatcatttaaaatatttttgagaaaaaagaaaaaaaagaaaaattatagaagattcttttaaataaaaataattaaaatattttagagagagaaaaaagaaaaatcatagaggatctgaaagttacaaaattgatcatcagaaaactggagtaatggtgattcaattgagcaaaatataaaatattagtaaaagataacgtcattgaagttgtaagtctaaagacaaggagatcgtggtataatggaatcctaagttgttgttggattttaaaagaagagacgcactagcatacaaggagaattctgtgaagggaaacccatagaaagattgttttttcgcaaatttttcaatggatgattatgatgctataagatctggtctttattctttttgcgctctataagatcaggtttgtttgttttttttttcttttctctcgttcatttgttgttatgtttggctttttttatttaatttttggtttcatgaattcgtgtatgtatgctatccaaatgtttgttttttgaataaaataagtatacacatttcgaccgcatgtttacattcatattgtgggttaaaaagcatattttttacttgcttattggtcctgataaatttctgtatataaaacagtaagatcgagtgtcgagtttacaaggactttaactgtatccagagtttgtatatgttcaattttaagtaatcaataaattaaaattgatatttgtcaaataatgatatggaatataaaatttgacataaatgaagataattaagcatagtacattaaagatatagaatacaaacactcagaggtgggttgtcagttgaagtagaattacagaatatgttgagactcaacctatcaaaattactcttgatgcaacagtaagggttttttactatttaacgttattttgattattaccttcatccactaacataccctaatcatgatttctcatgtgaaagagtttaaattacctaatttcactcctaatcccttaagagctatatgaaataatttgctttaagaataaagatgtataataaataaggcaaaataatatcattctattcctaaacatggattacctagatgttcttttcaagttcataggaaataaacattttccaatgcataaaccctataacagtacacgagaataggtaatcaagctataaacatgatattaagcacaaaaaagacaataatattaaaataacattaaataaatagttagaataattacatcaagagtgtttaatagttgaactcccaacaatgggtgatttagcctctcattgtcatgagagggttactaatacaaaaagaaagcaagaggtgtgaaagaaaatggaggaaagggtcccaagtgaatagattttctctcttctctcatgtcttagcttctcaattttggtcccactaaagaattgcttgatttttcctttctttttcctttaaaatgaagcacaatcatgttttgtgatattgatcatgcgctaagccagcatgtgctcgcgaagcgcacatgcaaagtccatctgacataagtgaatgtgcgttaagccgcaaggtgcaggctaaaccgcatatgcgtactaggccgccacatacaggctaagctgtagatgcgcactaagtcgtcgtatgcacgctaagcatgacctccaagttggctcctcgcgttgaacggttgttgacgcgctgagcgaactgctccagttcttcaaccatattacagacctcctactgtgtaattctataaaaaaaatacactaaaaaatactataaatttgataactttagcatttattagacaaaaactcagaagaagttaaatttctaatgttctaacacaaaagaagcaataaaagagaggaaaattagataattgttatgtgatttaaacatttaaattacgtaagcggatcaattaacatattatacgtggaaaaaagtttttttttaaataaaaacaatgttgtatttgcccatttcttctctctcttatctatctctccatcacccttcatcttcctcatatcccaccactgtgccactgatggtgtttcattttttccctggtggttggactaaatgaaaacaaaatagatgaaagaatagatatgaaccaacaaaatcttaatatcaaaacattaaaccacaaaatcgagaaaaaaacaatgtttggttggcttcactaggtttcatggctggattcacatttggatttcatgtgggatttcacaatgaggtttgttgtgagttggggctcattggattttgcaacggtggtggcagtggagatcacagtcgttgggttttatgaccggttgagattgagatcatagttgggttcctaccaatatttctacactatgaataaagataaagaaatttctacactatgaatatttgaaattaattaagattagctaaattcatctaaataacaatatgcataaagataaagaaaattaaggaaggaaataaaagaaaaaattaagggaaaattttttgtttggaaattttaacaaacactcgtgtatacaaagtaaattgagattaaatcaatgaaaaaattgttcgggtttaatttgattggagttcctatcacgtaatcactacacatttatatttaataaacattatattatcattaacctaccatattatcttaactttaatttcttaagtgaagagagctaaatcccttgattaaactatcaatcctttggattagcataatcaaacaatttgcattaagacaaagtgtttattgatgctcaactatccctagacataaaaattattgggtgttctatccaattcgcaacttaatggaatttttctaatacaattgaatgaaaaatcatgcaaacaggtgcaagccaaaaacacatattaggcataaaagagaaacaattacaatgttttattgaataaaaaaaaagtagttattacatggaagaagaaacaattacattaaactctaagagaagattagttcatgacaataaaaaaacatgagatatacatcacataaatgtcttaaaatgacacaaaaatctaagaatacatgataattatcgatcatccaaaattaacttaggataaaaaaaagtaacatattaaaattttataggaatgaaaatgatatattttagtctattttttttaatgcttgacataactctcaacatttgttgtcagtcataaaaaaactttgacatggttttgatggagtggcctatggttcctgttgaaaaagtggggccttgatatggatttggtggagttgtctacggtttgtctagaagataatttttttcttttattttattttgaataataaaaatttgataatttaaaattaattataatttcaaattgcatgtaatagaagccttgaatttaataatgcaagactttttgttgtttacttaacacacgtgtaatgaaaggattgatttaattaatggttaaatttgaagactcattattaaaccaaattttattacctttattgtaaactattaatgttttttataaaaatattaatatttacttaaaataaaattttcattaatttaagcaattctataagttaaacaaagaaaataaaatgtttcttattttagtatttggcacaagaataaattacatttctttgtagattatttaagttatcgtatgaattattttttaagaatattatattgaagtgagtatttttatgattgcttaaatttggcacttaaaattatttaaaaagtaaaatggaaattaaaattatgctgctcctattatttaagctgacaacttgtaaagaaaataaaaaatatgatactaatttttatgataaaaaaataataatattcaataaattgtatatttatttttctcttctatcactattcttaaaatatcaccacataagtaaatgaaattcaggaaaagattttaatatatgaagacttgtggtctaaaaattaaatagctaggaccatagataaataatttcaaaaacatgccacacttctagtagatcatatcctctaatttacattttaagttaaatgtgatctacaatacgtgaagaaatttggaccaagacttataaaaggaaaaactatgattcaataattatgatagaccaagttaaacaagcattttacatttttttgtatctcactaattaatttttaatgaaaaagaaaatactatgcaggttaaaatacaattagaaatagacgacataacaaattttccaattaatgacaatgaaaattagtcttttttcatatataagaagaatattattttgtgaattaaaaaatggatcaaaataaaatagctagataggaacgaaatagtctttttttatatagattttttaaccgaaataatttttaaattatatccttttttctataattgatgtattcatcattaattttttccttgcttacttaattctaaacatttgtagtcaatgataagaaacttgatatgaaggtaatgtggtgacctatggttcaagttgaagaagtggggggacattgacatgaacttggtggagtggcctatgggctatggatgaagttgaagaagtcagagaccttaatatgggtggactttgtggagtgtcctaaggttaaagatgaaaaaatggaggaccttgacatggacttgatggagtagtctatggttcaagttggaaaagtggggaccttgatatggatttggtggagtggccagcggtttctctaggagaaaattttgttttcatttcttttattttgaataataaaaatttgatagtttaaaattaattatgggttcaaattgcaagtaataaaatatttgaattttataatgcaagactttttgttatatacttaactaaggtgtaacaaaagaactgatttaaataatagttaaaatttgaagacgaattaagctaaatttagttacctctgatgtaaattactcaaatgttaaaaaaattattaatatttttttaagataaatttttcattgatttaagcaattatatacggtaaattaaaataaaaaatgtttcttattttagtatttggtacaagaataaattatatttctctatagattgtttaagttatcgtatgaatttgttttttttagaatattaaattgaacgtgagtatttttatgatattttaaatttgacacttgcaattatttaaaaagtgaaatggaaattaaaattatgtttctcctcttatttaagttgataacttgtaaaaaatacaaaatacgataccaatttttgtagaaaaaaagttaatattctttttcacacttctttttatataactaagtaatttttatatgataaaaaaataatattcagatttaaatacaattagaaatacatgatacaacaacctttccaattgatgacaattaaatttagtcttttttcatatataagagaatattattttgtgaattgaaaagttgatcaaaattaaatagctagattggaatgagataatcttttttttatatagatttttttaaactgaaatggtctttaaagtacacccttttcctataattgatttattaatcaattatatattttttccttgcttgacttaactcgcaataattattgtcaatgacgaacttgatatgaaggtaatggagtgacctatggttaaagttgaagaagtcagaccataacatggctggacttggtggagtgcccaaaggttcaagatcaacaaatggaaaaccttgagatggacttgatggtgtgagctttggtttagaagacaaattttcttttacattatttttagtttgaatattgaaaatttgataatttaatattaattatggattggaatatcatgaaatagaagacttgattttttctttttttaaaaatattggacttttactgttttcgtaacaaaagtttaacaaaaggattgattaaataatagttaaaattcaaagtttaatgataccaaattttcatttaagcagttctaaagggtaaattaaaataaagtgattcttatttatttttgtaaaaaaaaagctgtaccaaaaagaatgttatttattttagtattgagcacaagaattaatcatatttcattgttattaattttttttatgaatttagtgtacataggaattttaaaaaaagagatagatacagtaaatgcataatttttcgtattctaagaattaattcgggagaattggataattaagtcgataatttaaaaaagccagcgtaaaaaaagaagtgaattaaaatgttaaaaaaatattttagtatttgtcacaataataaaaaaacgtaaaaaataatgaaagtgaaaaaaaaaggcttaaaatataattgtcgtctttttttaatatgttattttagttttttatttttaattgaaatattttatctcttatttttaaaaaatcttgtaattttagtctttttattttttaattgagatatttttaaaaaatatgtcattttaatccatttgatcaaattcttgtttttaattaggatattttgtcctttaaaagttattttgaagaaaccaagaaatacaataaattttattgattttaataaaatacttatttcctattctaagaattaagtcggagaattggataataaagtcaataattaaaaaaaggaaacgccaaaaaaaaaaaaaagaaagacacttgcatcagtataaaggaaaccgttctaagaagtgaattaaaatattaaaaaaatattttagtatttggcacaataataaaaaaggtaaaaaataatgaaagtgaagaaaaaaacaggcagggcagcagtataaataatagaagtttgatgatttatatgcagaaccaacaactacacttgttttctatatattcttgtgtgatcatgaattcctccatttatattcttgtctttgtccagctttggttgttcagcttaccatgcagagagagtgtgtgcatcccaagtgagcgtgagacacttttgaagtttaagaataatctcaatgattcttcaaataggctttggtcttggaatcataatcataccaactgttgccactggtatggagtcctctgccacaacgtcacttcccatcttcttcagcttcacctcaacacttcaccttctgctttctatgatggcaactttcacttcgattgggaagcttaccagagatggagctttggtggagagataagtccttgtttggctgatttaaagcatttgaatcacttgaacttgagcggcaattatttccttggagcaggtatgtcaattccttctttccttgggacaatgacttccttgactcacctcgacctctctcttactggattctatgggaagattcctcctcagattgggaatctctccaatttggtctatcttgacctcggaaattatttttccgaacctctgtttgctgaaaatgtagaatgggtatcaagtatgtggaagcttgaatatctttatttgagttatgcaaacctatccaaagcatttcattggctacacactctccaatctcttccttctttgacccacctatctttgtcaggatgcacactccctcactataatgaaccatccttgctcaacttctcatctctgcaaactctccatctttccttcactagttattcccctgccatttcttttgtccccaagtggatattcaaattgaagaaacttgtttctcttcaattatggagtaataaattccaaggttcgattccttgtggtatccgaaacctcacacttcttcaaaatcttgacttgtctggaaattcattctcatcttctatacctgattgcttatacggtcttcatcgtctcaagtctttggaaattcattccagcaacttgcatgggactatttctgatgccctgggaaatttgacttctcttgttgaacttgatttgtcatacaatcaacttgaaggaaccattccaacttctttgggaaatttgacttctcttgttgcactttatttgaaatataatcaacttgaaggaacaattccgacttttttgggaaatctccgcaactcaagggagatagatttaacaattctcaatctctctattaataaattcagtggaaatccatttgaaagtcttggatcactctctaaattgtcatctctttggattgatggcaataattttcaaggagttgtcaaggaagatgatcttgcaaatcttacaagcttgacggattttggtgcatcgggaaacaatttcactttaaaagtgggtcccaattggattcctaattttcaacttacctatttggaagtgacatcatggcagttaggtcccagctttccattgtggattcagtcacaaaaccaacttcaatatgttggactgtctaacacggggattttagattctattcccacttggttctgggaaccacactctcaggttttgtatttaaacctctctcataatcatatccatggtgagcttgtgactacaataaaaaatccaatatctatccaaactgttgatctaagcacaaatcacttatgtggtaaattaccctatctttcaaatgatgtgtatgacttagacctttcaaccaattcattctctgaatccatgcaagattttttatgtaacaatcaggacaagccaatgcaattagaatttctcaatcttgcatcaaataatctgtcaggagaaatacctgattgttggattaattggccatttctagtggaagtgaatttacaaagcaaccattttgttgggaacttccccccatccatgggttccttggctgagctgcagtcattagaaattcgtaacaacttgctctcgggaatatttcctaccagtttgaagaagactagccaattgatatccttggatctaggagaaaataatctttcaggatgtattccaacatgggttggagaaaagctctcaaatatgaaaatcctccgccttcgatcaaacagtttttccggtcacattccaaatgaaatatgtcagatgagtcttcttcaggttttagaccttgcaaaaaatagtttgtctggcaatatacccagctgtttccgtaacttgagtgccatgacactagtgaaccggagtacatatccccttatctattctcaagcaccaaatgatacacgatacttttcggtatcaggtatagttagtgtgctactatggctaaaaggaagaggagatgagtatggaaacattctgggtttggtaacaagtattgatctgtcaagtaacaaattattaggagaaattcctagagaaatcacagatctaaatggattgaactttttgaacttgtcccacaaccaattgattggtcctattccagaaggtattggtaatatgggatcgttacaaaccattgatttttcgaggaatcaaatttctggtgaaattcctccaaccatttctaatttgagctttctgagcatgctagacgtgtcttataatcatttgaagggaaaaattccaacaggaacacaattgcaaacctttgatgcctccagctttattggcaacaatctatgtggtccaccactgcccataaactgcagctccaatgggaaaactcatagttatgaaggaagtcatgggcatggagtgaattggttttttgttagtgcgacaattggatttgttgtgggactttggatagtgattgctcctttgctgatttgtagatcatggcggcatgcctattttcatttccttgatcatgtgtggttcaaacttcaatctttttactcgtatagtatcactgtttagtgttgcttacaaccaatgttgtatcattgtattgccaggttgttcaatttgcattgtagttattgctatcttctttctttcttttttttttttttaaatttgatgttttgggatgtacatatttgcatatttgttcaattctgtgtatcacattcttgtttccaaaaatgggggactagtggttcaagaaaacgtggtttaataggaaaaaaactaaaacgtggtttaataggaaaaaaacttatatttaattttagtcgctaaccattgaagtgaataattagttctttcgtgtttgactctccaagccggccaggccaagaactttgatgagatatccatagataaccaatgatgcttgagaaccaacaaaattgttggagtaatattctaaattaccctaactataaaaagagcaaataataggtgtaactttttaagtattattcgttttgctttttcaagttttactttatataataataaaagtcaacttttaaaattaattatcaaattgaaatgttaactttacttaaaaattaacacaaaaaatactaaagaatttatctttataaaacaatttttttgaagagtcaaaatgaattaatattcaagtgttccaggatcagtattaattacaaccaaaactaacggaatatgaaacctgaaacagaaaagtgataacaaaatggcaggaagtatcttggctaattttttttttgataaatatataaatttttggaattcatttttgtaaaaatttaataaattttttatctttacaaaattaaaatgcattattattatttggtgtaaatgtagattcacataaattaaaattatgaatttttatattgattatacatatatataatgaatgtaaatatattatttttaaatcagttatacatataactaaatatgtaataaataatttggaatgtttaaatcttacttcaagaaaaaaaaatatagataacttttcaatattttaatatttataagattaaaaatatattttaaccttataaaatatcaacaaatcttttgtttaacagtttttaaccttataaaatatcaacaaatcttttgtttaacagttttaagaattaaataattgatagtaatcataattttaaggtatttttgaatggtcatggcccaagcattctttgacatggtcactgcccatgaaagctaccgatatcgcatcaacatttactcacttcttccattaaaaggaactggaggctgaaagtcgtaatcttcatttttatactttttagattatacaaagttggaaatattaaaacattatgtggtgggcgaattagtgaacaaaaattataagatctgcacagcttattctaatttaattctaattaagaaattaattattttccattttactccctttatgacaaatttaatttttacttataagccggtctctgataaaccttgtaccatattttaaagcaaaccgtaacacatcataaaacttagtgatataattttagatgtctttgtgtgtgtgagatgtattgttaatatttatagcatccttcctcataaaatttagggatataaaataatttgatttgccttttatgtgtgtgtgcgtgatgtaatgttaatgtttacgaccaagctaaaagtacaacaaaaataatttttatctgaaggttttcttgtaataaatataatggccgggtgaaattagccataatcaaattctaatttttttatttcctttttatatacagtgccatatataacaggaaactgaatttgtccgttttcacactagactaacagcgccaagaatgagaatgaacataattttcagcaactttgatctgtagactctaggttagtattaaaaacataaaacaaaatattattgtaaacataaagatgaaaattattgagtctaaccttttttatgaaaagaggagagtataagggaggaaaggaagaaccaatagaaaaatcaatttttgattcaaaacgtccttaattgcccctgtagctcaatggtacgtagagacttcagtcttgcaaactgaaggtctgtagttgcacactatgggggcatccaatattattaattttttttttcacttgattatgaaaaatgaataaagtacgaactgattagatatttttttccaacttattttcagagcatagtaaataatcaaattctaatttttttatttcctttttatatacagtgccatatataacaggaaactgaatttgtccgttttcacactagactaacagcgccaagaatgagaatgaacataattttcagcaactttgatctgtagactctaggttagtattaaaaacataaaacaaaatattattgtaaacaacaacaacaacaacgccttatcccactaggtgggatcggctacatggatcaacttccgccataatgttctatcaagtaccatacttctatccaaatcattaagttcgagatccttttttatcacctctcttatagtctttttgggtcttcctctgcctcgaattgtttgtctactctccatctggtctactctcctcactacagagtctaccggtcttctctctacatgcccaaaccacctaagtctattttccaccatcttctctacaataggcgctacttcaaccctctctctaatagcttcgtttctaattttatcctgtcgagtcttaccacacatctaccgcaacattctcatctccactacacctactttattctcatgttgactcttgaccgcccaacattctgttccgtacataaagatgaaaattattgactctaaccttttttatgaaaagaggagagtataagggaggaaaggaagaaccaatagaaaaatcaatttttgattcaaaacgtccttaattgcccctgtagctcaatggtacgtagagacttcagtcttgcaaactgaaggtctgtagttgcacactatgggggcatccaatattattaatttttttttcacttgattatgaaaaatgaataaagtacgaactgattagatatttttttccaatttattttcagagcatagtaaataaattttttttagaatgtaagttgataaaattatatatgatagaaatatgacactcttacaacaattcatataattcagtcaacgtcaatttatttatctatttctaaccatcatatcatttattatactttatttgtaaccaaagatctggtttaaataatagttaaaatttgaagactaattaagttaaatttaattacctttgatataaactactcaaagttttaaaaaaattcttaatattttcttaaaataaaactttcatttgatttaagcaattctatacggtaaactaaaagaaaaaagtttcctattttagtatttggcacaagaataaattatatttctttgtagattgtttaagttatcgtatgaatttatttttgagaatattatattgaacgtgagtattttatgattgtttaaatttggcacttgcaattatttaaaaagtaaaatggaaataaaaattatgtttcttctcttatttaagttgataaattgtaaaaaatacaaaatatgatactgatttttttgagaaaaaaagttaatattctttttcacactttttttatataactaattaatttttatatgataaaaaaaataatattcaggttcgaatacaattagaaatatataatacaacaacctttccaattgatgacaattaaatctaatatttttctcatatataagagaatattattttgtgaattgaaaaattgatcaaaattaaataggtagcttggaatgaaataatccttttttatagattttttaaccgaaatagtctttaaaatacaccctttttctataattgatttattcatcaattatatttttatttttcttgcttgacttaactcgcaacatttattgtcaatgagagggaacttgatagaaaggtaatgcagtgacctatgattaaagttgaagaagtcagaccataacatggctggactttgtggagtgttcaaaggttcaagatgaacaaatggaaaaccttgagatgaacttgatggtgtgggctatggtttagaagacaattttcttttacattatttttagtttgaatattgaaaatttgataatttaatattaattataggttgggatatgatgaaatagaagacttaattttttttaaaaaaaaaatgttggacttttgtacgtaacaaaagtttgaagtttaatgataccaaattttcatttaatcagttctatagggtaaattaaaataaaataattcttatttatttttgaaaaaaaaactataccaaaaagaatgtttcttattttagtattcagcacaagaataaatcatattttaaaaaaaattattttagtattcagcacaagaataaatcatattttaaaaaaaaatattttagtatttgacacaataataagcagtataaataatagaagtttgatgatttatatgcagaagcaagaagtagacttgttttgtatatattcttgtgttgcatgacacatcatgaattcctccattatttatattcttgtctttgtccagctttggttgtttaggttaccatgcagagagagtgtgtgcatcccaagtgagcgtgagacacttttgaagtttaagaataatctgaatgatccttcaaataggctttggtcttggaatcataatcataccaactgttgccactggtatggagtcctctgccacaacgtcacttcccatcttcttcagcttcacctcaactcttcaccttctactgctttctatcgttactatgatggctacgattgggaaggttataggggattccagtttggtggagagataagtccttgtttggctgatttaaagcatttgaattacttggacttgagcgccaatgattttgaaggtatggcaattccttctttccttgggacaatgacttccttgactcacctcgacctctcgtatactggattcatctggaagattccatttcagattgggaatctctccaatttggtctatcttgaccttggaagtgattttttggagcctctgtttgctgaaaatttagaatgggtatcaagtatgtggaagcttgaatatcttcatttgagaaatgcaaacctatccaaagcatttcattggctacacactctccaatctcttccttctttgacccacctatatttgtcatactgtacgctccctcactataatgaaccatccttgctcaacttctcatctctgcaaactctccatctttccgctactatttattcccctgccatttcttttgtccccaagtggatattcaaattgaagaaacttgtttctcttcaatttaggggtaatgaattcccaggtccgattcttggtggtattcgaaacctcacacttcttcaaaatcttgacttgtttaaaaattcattctcatcttctatacccgattgcttatacggtcttcatcatctcaagttcctgaacctaatggccagcaacttgcatgggactatttctgatgccctgggaaatttgacttctcttgttagacttgatttgtcatataatcaacttcaaggaaccattccaacttctttgggtaatctatgcaacttaagggacattaatttctcaaatctcaaacttaaccaacaggttaatgaacttttagaaattctagctccttgtatttcccatggactcacaaatcttgcagttgagagttcatgactttcaggcaatctgacagatcatattggggcatttaaaaatattgacatgctacatttttacgacaactcaattggtggtgctcttcctagatcatttggaaaactttcatcattaagatatcttgatttgtccactaacaaattcagtggaaatccatttcaaagtcttggatcactaaattgtcatttcttcttattgatggcaataattttcaaggagttgtcaacgaagatgatcttgcaaatcttacaagcttgaggggaattgatgcatcaggaaacaatttcactttaaaagtgggtcccaattggcttcctaattttcagctttcctatttggatgtgagatcatggaagttaggtcccagttttccatcgtggattctgtcacaaaacaaacttctatatttagacatgtctaacacagggattattgattctattcccacacagatgtgggaagcactttctcaggatttgtatttaaacctctctcataatcatatccatggtgagattgggactacattaaagaatccaatatctatcgacaatactgatctaagctcaaatcacttgtgtggtaaattaccctatctttcaagtgatgtgtgtcggttagatctttcaagcaattcattctctgaatccatgcatgactttttatgtaacaatcaggacaagccaatgcgattagaatttctgaatcttgcatcgaataatttgtcaggagagatacctgattgctggatgaattggacatttcttgtggatgtaaatttacaaagcaaccattttgttgggaacttaccccaatccatgggttccttggcagagctgcaggctttacaaattagtaacaacacactctcaggaatatatccaaccagtttgaagaagaataaccaatggatatccttggaccttggggaaaattatctttcaggaactattccatcatgggttggagaaaagctcttaaatgtgaaaatcctccggcttcgatcaaacagttttgccggccacattccaaatgaaatatgtcagatgagtcttcttcaggttttagaccttgcacaaaacaatttgtctggcaatattctgagctgtttcagtaacttgagtgccatgacactaaagaaccaaagtacaggtcctcgtatctattctctagcaccttttagttcaagttatacttccagatatagtatagttaattagtgtgctactatggctgaaaggaagaggagatgagtacaaaaactttctgggtttggtaacaaacattgatctgtcaagtaacaggttattaggggaaataccaagagaaatcacagatctaagtggattgaattttttaaacttgtcccacaaccaattgattggtcctattccagaaggtattggtaatatgggatcgttacagtgtattgatttttcgaggaatcaactttctggtgaaatccctccaaccatttcacatttgagctttctaagcatgctggacttgtcttataatcatttgaaaggaaaaattccaacaggaactcaattgcaaacctttgaagccttcaactttattggcaacaatctatgtggtccaccactgcccataaattgcagctccaatgggaaaactcacagttatgaaggaagtgatgagcatgaagtcaattggttttttgtcggtgcaacaattggatttgttgtgggattctggatggtgattgctcctttgctgatttgtagatcatggcggtatgcctattttcatctgcttgatcatgtgtggttcaaacttcaatctttttactcatgtagtatcagagtttagtgttgcttagaatacaccgatgttgtatcattgtattggcaggttgtgatcaatttgtagtcattgctatcttcttttttcagattttagagccttatgtaaattctgttttgggacgtaaagattttcatattgagcataatatcgcagatgaattcttgttaattttgtaatttagatcaactagatgtaattctatgataaaaacatttgctaaatcccgtagattaaaattcaaatagttagtaagtactgttggttaaaaccaagttttgaaatcacatgttaggtaagttgcttaagttaatattgaatgagttttttgaaactttaagaaaagtaactttaaaataaatgttttttatataagtgtttttttaagaaatagataagattcgtttcttaaaaaaagtaaaaataatttagacaaacataccaaaaaaaagttacttattttattaaaataattaaccatttatttcaataaataagtttaaacaaattgatgtattatattcgcttgaaatcagatttcaaatattcatttgttgttgagtattacatccatttctatccaattatttgggcttataacacattcctagtattggctgcctttggagcacaattgagacttttctagagtttctattgaacatgattcagaaagtacgcccttagagccttagaagcaaacaaaattttatgatcaaagtaagcaaaccacatgaccacaaaataaatgtttacttctactagtcagcatgtcttggatcacattttgagctagctagtaatcaaatatatatatatatatatatatatatatatatatatatatatatatatatatatattctgcaatgtcaattttttttttgaacctattttttagttcaacaattgaggtacgacaatttaaataataaattcttcagcttgtttgtaagcttaaggacattgataatagaatttcagaagttttctcgtcttcattttagttcatacccacgttattctcttttctgcatttaatttgcttgctgtcaaagacttggcaacttgtcattgtttaaacatttgttgcattgttaacatagatgtatcctaacttggtaaatgtttgtcttaacttacaaattctttcacaaaaatacctctgaaacttattctattttttcataattaatttcttatttcggaaactgcaatacaaatgtttgctgagtagtcaaactacaccttaagtactgttggggtttgatcagaacctaggatcataggtcgtaacacaaattttaggttcttaatcaatgtgccgtataaaaaaaaaaaattctatcttatttaatagtactatctgaaagaggttgtcaatttctctgtatatttaatcttatccaatttacagaataaaacactcatatatggaagttttttgaggaactgcacctcccaagccataagccataagccataattctctcacaattgacaagataatcctttcactccatctctcctcttatttataagcaatctgccatacttcttctctacctaagctcaacaaacaggtatcaacaattaacaaactaacgaactgactaactctaaatactaacagatattcttttaaaacgtattagatggaatgttactaatgccttttaattatgagtaattatccaataaatgagttaacttaaaatggaatattcttaacacactttttaaacggtcaaagaacaatcatttaggtagtatagaaagagttggtgagggataattgtagagcataattgaggaggtgatgacacataagcaaatagtgtggtgtggcaatatatacttgacatggcagccacgcagcatattgtcttgtagcttaatatttatatattataaatagatagatagtgtatgcatcaaaggttgctagcatgacatagttggtgtagtgacaactgacagagttgggaagcaaagtacaaaagttcaatgttgagaattattgtccacaaatctgcgctcacatgcatctggtgtcaaatacaaagatgactcaacggtacgcgttgaaatgttgaatgctccttccgaaagtgatctttaaaaaacttaaaatctcataaactttttcgatctcctgtgttctgtcctttggaatttcaaaattaggaggtgaaaggacgaaatctgctgtgtgtgtgaaagttgttgtcatttcataacttgttatgccgaaattgaaattatgataagatgaattggaaagaaaacattgatccactggaatgtgaaaggaatttaaaaagtccacaggaattagaaaaaaaaattgtagaagatgtggccgtacaagaggacttgatcataaaaaaactcaagtaagggtcattcaactgagaagaaaaaataaagcggttgctaaaagataaagtcatgaagttacaagcctaaaacaagaaagtcatggtataattaatagaatcatttggttacttagagaccaagttgttcttggattataaaagaaactcgttaccctcaaagagggggacgaataaagaaggaaaattcagtgaaggggcatgtatttgttttattccatttttctgttgttagaaagtgatgaattattttccttgtagtataaaaattccgagtttatgttctttcttaatttatattgcttgtttttaaataaaaataatttaattttaactcattcaattgtttgtgacattaaaagagtagcactcctactttttgatgttgcttaatcataaaatttaattgaataatcattaatttgttatcttaaaagttcatagtttttatttataaaaaattgattcaagtatcaatcaataacattacaaataacaattctatcttcaatattattggattgtgagggtctaatgaataatcattttgctagcttaaatccttgtgctacattttttcttttgataaaaaattaaaaaaaaaattctttaaaaaaaatcaaatgtgctctttttaaaataaatgaaaagaatgttttggtgtaaaataaatatatataaaattataaagattttgtgcatttaaatataggttccatttttttaatggacactttagggtgtcaagacctttcctaatccactccccaacctattttttgttcaaagaccattattttttgaggatttttcaatgtttacgtgtgtattctggtcacgtaaacttttgcttcctattctttaggcttgtcaaatagatagattaaataatttttttattagattacagtggatggattattaaaagcaatccgttaatcatttatgatctattaaaaagtcggatagtaattattttgtttatcttttaattagaataccattctgttagacaatcagttaatcaatttaggatctattgagaatactatatatttctgtcaacagttcataagaaaaaatgatgcaggtttatcttttatcctttccattatattagtttatcttttagaataatctatcgtttagtttatttatttttagattaatttatcttttagtttactttttattcgtgaacacacatattcaaataaataaataataaactattcaacctattctttaaaaagatattataaaaggtaaaaaataaactaagagattaatcatcgattatatatccgttgaatgaaattcatccaattcatcttatttataagcctttccctttacttggtcatcctcataactcacaagccacgatggtattcatctttcccttcctttaattatgcgattcattacaatgcaaagtatttctagcttttcattttctgatactgctatatattgataacgggatattggaaacgatttttgttttggtttttcacccatgatattacattattaatgctgtgcatgattcatattttaaggacaacacaaaatgatagagtaaacataaaagtcatttcttgttgggttacaaatgggttggggttgtatatgtgtttctctcatatccttcagaattcttgtagttattcctaacaacaattaaattttattcttctttttagacaactatctctacttttttggaacaaaaaattgcatgcaaagttattgatatcagtattatctaaaataaaaaaattgaagcatttgtacgtctaacgtttttgtggacaggcaccaggaaaaggaaaagaaacatagggggaattggtggtgaggagacagaggcaaattataagaaatgcaaaagatgatagggacaggatcagtgagttacctattcacgttttcctcagaataatattggaatttatgaacacaaaagatgttgttcggctttgtgctttgtctaaaagttggaaggatttttggaaacgtttaactactctctcagttttgattcttgggactcaagtattttcaattgccacaagtttgtgttcgaggttttgtctggtcgagatggttaattccattcctctacttaatcttgagatcattctccgcaccgacctcgaacaactagatgatatatatcctgaaatatggcgtgtctcacaacatccagcaattgaaaatctttctttttgtgaaccatagattccatttggtgtttccctcttctattttttctgtccaactatgacatctcttcgcttttccccttcctgaaaatatgctgtgttaaagtcctttggattaataattctaacccggatcttgcttaccctattgatggttacaaaattgtgttttcaactccgagtcttggttttctcactatcaacaatgttcatcatggtcaccaacttccctccacgtgtaatctttcatctcttgaagtagatattaatgtcagtgtttcgccatgttctccattctttaaaagtttgttccaagtgcttgctaatgttaacaaattgacactttcttggaggaccctaggatgatgctatttttaatttttactttgtatgttttgtctttttcggtatgtgtttgaaagtattttttttctctacgattttaaacttattatctattctaataaagtgctgaaagttatattcctatttcttgcttaaataatttagtaaatatttcttttatttccctttctttctgatgctctcttgaaagaaactataggatgttatatatattgtggggagtgaaaaacacaaacttttcttatatattcttttgaacgtttacttaaaattcttaaggtgaagattttttaaaattgtttagttttttatttcattttattattaacttattccttttttttttcggtccaagattaacgtattcccttatgctctcttacattagattatagattgttacactgtgagtgctctgtttgctctgtttgttatatatgttgtttttaattgacttttacgtaagattaaagtttttaattataagaaactattagagtgaagcaggggaacaaaaatcttgcattgatattaagaaatacattctttggtgatgcagaaacaatgttgtgccatttgcagagcattatttgagaaaatagtatcaaataacgacataatcaattggtgtcgtttgtgtgtgtaaaatagaaaagcaagtagcatagcaagagcaggagtttgaataagaaataaatgttgagcatgttaaatcaacaaaacaaaattgcaaataatgatttaagaatatggctgaaaacaaggatgtgatccaacactaaggtagaaaataaaagcatatcagtcaaatggcaagccaggacagaaaaatatttatttagtactttgtatagactaatagtgattaggaagggaaggtggaatctgggtttgtggagtaggtctaaattcctaataatttgcatataatatttccgttatgtatttttaatattttttaacatgtttgtaatcttttgtttattgcaatcaattacttatctcattttatgcacatgtaagtagtaaatttataaaatatttttgtcaattttataagttagttgttttgaaggaaaatgaacattggggaagttgaagtttccttgctgagctgtagtcttaacaaattcctaacaacaaacctacaggaatattttcctaccagtttgacgtagaataaccaattgatatccttggaccttgggaaaaataatctttgagtaactattccaacgtaatggagtgacctgtggttcaagttgaagaagtcagactttaacatggctagaatttgtggattgtccaaaggttcaagatgaaaaaacggagcaccttgagatggacttgatggagtgggctatgggttgggatatcatgaactagtacacttgatttttttttttaaatgttggacttttattgtttacataacaaaaatttaatgaaaggattgattataatagttaaaattttgaattttaatgacaccaaattttcattttaaacagttctataggataaattaaaatataatgattctttttttaaaaaaaaatactgtaccaaaaagaatgtctcttattttagtattcagtccaagaataaatcatatatatttctttgttattaattttgaattttattttatgaattttgtgtatatatgaattttaaaaagggagatagataaagtaaattcaaaattatttcctattctaagaattaattaagtcgggagaattggataataaagtcaataattaaaaaaaggcaactaaaaaaaaagaagaagaaagaagcacttatacaattaagcttaatatgcagaagcaagaagcacttatacaattaacttgtttcatatatgcgttgcatgatcatgaattcctccaccatttatgcgttgcatgcttgaatctctcttgaaatgagatttcaaatattcacttgttgttgggtaatgaaatccaaggtccgattccctggtggtattccaaacctcactttttcaaaatcttaacttgtccaaaagttcattctaatattctatacctgattggttatacggtcttcgtcgtctcaagtatctggacctaaggtacagcaacttgcataggactatttcttatgttctaggaaatttttctcttgttgaacttgatttatcaatcaatcaatcaacctgaagcaaccattcgaacttctttgggtaatctatgtaacttaagggagattgatttctcatatctcaaactcaacaaccagattaatgatattttagaaattctagctccttgtacttcccatggactcacaacactttcaggaaatttgacggtttgttaccgttcaggggctaatcttttccattttttaccatatggaagtattttttaaattattttccaaaagaagataagttgtatcagttgttactgagttagaagtcgtgatatcgattatgacttattatttttttcttttttaacgaaaatcataaaattatttatgactttaatgtcatttttttatctataactttaaagttatttttttaaaaaaaaaatttatgaattcaaagttgtaagtgtgacaccctctacccagacatatatatgaataaataaaatatataaaaatatcgataatcatattcacacggataaaagattcacattagcttcactgttatcaattaaaacttattaaaacatattcggctcaaaataaggccgtcaaaatttacaaaaatattttgttaaaccagtgagataaaataaagtagactaacataatgcaattaatataaaacttatgtctcacagtcacatcctatcagtgcattgtgtcccgacgttcttcagcacaaggtttcttaaatcacttcacctagtcatgtgcttccccgaatacaaggttcaagatcatcacaggatccaaacacaaacaacacacagggagtgatttatcacattcctaactaatagagaaaaataaaacaacatataggtataaatattatataacaaaatacaatttacttgagcataactcacattatttcaccacacgtctcattcgttttcacaacatttgcatattcaatagtcaaaacacaatatcatcaaatcaatcaatatagaacaatacacaagcgttatgcagcagatacactaagactcaatcttatatacaatgtagtaccatgtcagtgaaaaatctcgtcgcccttaaagggtcttaacattaactcatcgcccttaaaggctcttaacattaactcattgtccttaaagggtcttatagtcgtgtgattgtacaatctacagtttacaactcaaatgcacacaacatctcaatcatgtgcatactgagtttatcacatacactcgatctcaattataatgttataatatcaaaatagcatgttgtcacacctcatgaatcatattcactttacctatgaactatgcaatacttgacatggactatgtgaagtgtcctaaggttcaagatgaaaaaatggagaaccttgacatggacttcatggagtagtctatggttcaagttggaaaagtggggaccttgatatggatttggtggagtggccagccgtttgtctaggagaaaattttgtttttcatttcttttattttgaatgataaaaaattgatagtttaaaattaattatgggttcaaattgcaagtaatagaatatttgaattttataatgcaagactttttcttatttacttaacacaggtgtaacaaaaggatttgatgtaagctactcaaatattaaaagaattattaatattttcgtaagataaatttttcattgatttaagaaattatatatggtaaactaaaataaaaaatattcattattttagtatttggcaaaagaataaattatatttctttgtagattgtttaagttattgtatgaatttgtttttttttttagaatattaaattgaacatgagtatttttatgattgtttaaatttggcacttgcaattatttaaaaagtaaaatggaaattaaaattatgtttctcctcttatttacattgatatcttgtaaaaaatacaaaatacgatactggtttttttgagaaaaaaagttaatattctttttcacacttctttttatataactaattaatttttatatgataaagaaaataatattcaggtttgaatacaattagaaatacatgacacgacaatctttccaattgatgacaattaaatttagtcttttttcatatataagagaatattattttgtgaattgaaaaattgatcaaaattaaatagctagattgtaacaagagaatctttttttttatatagatttttgaactgaaatagtctttaaagtacaccattttcctataattgatttattcatcaattatatattttttttcttgcttgacgtaacttgcaacatttgttgtgaatgacaaggaacttgataggaagatagtgcagtgacctacggttaaagttgaagaagtcagaccataacatggatggactttgtggagtgtccaaagggttcaagatgaacaaatggaaaacctctagatggacttatggtgtgggctatatatgtttaatttagaagacaattttcttttacattatttttagtttgaatattgaaaatttaataatttaatattaactatggcttgggatatcatgaaatagaagacttgatttttttttttttaaaattggacttttattgtttacgtaacaaaagtttaacgaaaggattgattaaataatagttaaaatatgaagtttaatgacacaaaattttcatttaagcagttctatagggtaaattaaaataaaatgattcttatttatttttgtaaaaaaacctgtaccaaaaagaatgtttcttattttagtattcaccacaagaataaatcatatttctctgttattaattttgatttcttttatgaatttagtgtacataggaattttaaaaaaggagatagatacagtaaatgcataatttttcgtattctaagaattaattcgggagaattggataattaagtcgataattttaaaaagccagcttaaaaaaagaagtgaattacaatgttaaaaaaatattttagtatttggcacaataataaaaaaaggcaaaaaaataatgaaagtgaagaaaaaaataggcttaaaatataattgttgtctttttttttaatatgttattttatttttttattttttaatttaaatattttatctcttatttttttaaaatcttgtaattttagtctttttattttttaattgagatatttttaaaaaaatatgtcattttagtccatttgatcaaattcttgttttttaattaggatattttgtcctttaaaagttagagacaataatatcgctggactttgtggagtgtccaaaggttcaagatgaaaaaatgaaaaaccttgaaatggatttgatggagccggccatggtttgtttagaagataattttcttttacattatttttagtttggatattaaaattttaataatttaatattaattatgggttgggatatcatgaaatagaagacttgaatttttttaataaaatgttggacttttattgtttaattaacaaaattttacgaaaggattgatcaaataatagttaaagtcaataattaaaaaaggagatagataaagtaaattcaaaattatttcctattctaagaattaagtcgggagaattggataataaagtcaataattaaaaaaaggaggcaacgtaaaaaaagaaaaaagaaaagaaagacgcttgcatcagtataaataatagaaagaagtaagtttaatatgcagaagcaagaagcacttatacaattaagctgtttgatatatccttgtgtgatcatgaattcctccatttatattcttgtctttgtccagctttggttgttcagcttaccatgcagagagagtgtgtgtatcccaagtgagcgtgagacacttttgaagattaagaataatctcatagatccttcaaataggctttggtcttggaatcataatcataccaactgttgccactggtatggagtcctctgccacaacgtcacttcccatgttcttcagcttcacctcaacactacgttttctgctgctttctatgatggctactatcacttcgatgaggaagcttatgagaaatcccagtttggtggagagataagtccttgtttggctgatttaaagcatttgaatcacttgaacttgagcggcaattatttccttggagcaggtatgtcaattccttctttccttgggacaatgacttccttgactcacctcgacctctctcttactggattcatggggaagattccatctcagattgggaatctctccaatttggtctatcttgacctcggaggttattctgtcgagcctatgttagctgaaaatgtagaatgggtatcaagtatgtggaagcttgaatatcttcatttgagttatgcaaacctatccaaagcatttcattggctacacactctccaatctcttccttctttgacccacctagatttgtcaggatgcacactccctcactataatgaaccatccttgctcaacttctcatctctgcaaactctccatctttccttcactagtttttcccctgccatttcttttgtccccaagtggatattcaaattgaaaaaacttgtttctcttcaattatggggtaatgaaatccaaggtccgattcctggcggtattcgaaacctcacacttcttcaaaatcttgacttgtctggaaattcattctcatcttctatacctgattgcttatatggtcttcatcgtctcaagttcctcaacctaagggacaaccacttgcatgggactatttctgatgccctgggaaatttgacttctcttgttgaacttgatttatcaggtaatcaacttgaaggaaacattccaacttctttgggtaatctctgcaacttacgggacattgatttctcaaatctcaaactcaaccaacaggttaatgaacttttagaaattcttgctccttgtatttcccatggactcacaagacttgcagttcagagttcacgactttcaggccatctgacagatcatattggggcatttaaaaatattgacacgttacttttttccaacaactcaattggtggtgctcttcctagatcatttggaaaactttcatcattaagatatcttgatctgtctactaataaattcagtggaaatccatttgaaagtcttggatcactctgtaaattgtcatctctttatattggtggcaatctttttcaaactgttgtcaaggaagatgatcttgcaaatcttacaagcttgatggagattcatgcatcagggaacaatttcactttaaaagtgggtcccaattggcttcctaattttcagcttttccatttggatgtgagatcatggcagttaggtcccagctttccatcgtggattaagtcacaaaacaaacttgaatatttagacatgtctaacgcagggattattgattctattcccacacagatgtgggaagcacttcctcaggttttgtatttaaacctctctcataatcacatccatggtgagagtgggactacattaaagaatcccatatctatccccgttattgatctaagctcaaatcacttgtgtggtaaattaccctatctttcaagtgatgtgtctcagttagatctttcaagcaattcaatctctgaatccatgaatgactttttatgcaatgatcaggacgagccaatgcaattacaatttctgaatcttgcatcaaataatttgtcaggagagatacctgattgctggatgaattggacatttcttgtgaatgtaaatttacaaagcaaccattttgttgggaacttaccccaatccatgggttccttggcagagctgcagtctttacaaattcgtaacaacacactctcaggaatatttccaaccagtttgaagaagaataaccaattgatatccttggaccttggggaaaataatctttcaggatgtattccaacatgggttggagaaaagctcttaaaagtgaaaatccttcgccttcgatcaaacagttttgccggccacattccaaatgaaatatgtcagatgagtcatcttcaggttttagaccttgcagaaaacaatctgtctggcaatataccgagctgtttttgtaacttgagtgccatgacactaaagaaccaaagtacagatccttctatctattctgaagcacaatatgttggtagctcttactcttccatctatagtatggttagtgtgctactatggctgaaaggaagaggagatgagtatagaaacattctgggtttggtaacaagcattgatctgtcaagtaacaaattattaggagaaatacctagaaaaatcacaaatctaaatggattgaactttttgaacttgtcccacaaccaattgattggtcatattccacaaggcattggtaatatgggatcattacaatccattgatttttctaggaatcaactttctggtgaaatccctccaaccatttcaaaattgagctttttgagcatgctagacgtgtcttataatcatttgaagggaaaaattccaacaggaactcaattgcaaacctttgatgcctccagctttattggcaacaatttatgtggtctaccactgcccataaactgcagctccaatgggaaaactcatagttatgaaggaagtcatgggcatggagtgaattggttttttgttagtgcgacaattggatttgttgtgggattctggatagtgattgctcctttactgatttgtagatcatggaggtatgcctattttcatttccttgatcatgtgtggttcaaacttcaatcttttcgctcaggtagtatcactgtttagtgttgcttagaatactccgatgttttatcattgtattggcaggttgatcaatttatgtcaacaaagaaatttaaacaaactaatccattatatttcaattttcagtaatgtgttatatttaatgaataagagttgtaccgtgggaattgttgtcattgcatctaaatacacaagtgtatctatttttttttaagttatgtttctttgaaatttattcatatgtttgaatctctcttgaaatgtgatttcaaatattcccttgttgttgggtaatgaaatccaaggtcgatccgattccctggtggtattcgaaacctcacacttctttaaaatcttgacttgtctcaaaattcattctcatattctatacttgattggttatacggtcttcatcgtctcaagtatttggacctaaggtacagcaatttgcataggactatttatgatgtctggggaaatttgacttctcttgttgaacttgatttatcaattaatcaatctgaagcaaccattcgaacttcttggggtaatctcagcaacttgggaacttgggggagattgatttcttatatctcaaactcaaccaacaggttaatgatattttagaaattctagctctttgtatttctcatggattcacaacacttgcagtttcgagttcacaactttcagtcaatttgactgctttttaccattcagggatatttttcaaattattttccataaaatgactctttttaataaaaaaagtcttatcaggtgctactatatgagttagaagtcataaaatgactctttttaatagaagtcataaaattatttataactgtaattttttttagttgggacttcaaagtcgttaattttttttttattttacaactagtctttttttaatttttttaacttaagactttaaaattgtaagtttaatttttttttatttttatgacttttgaaattgtgtttcgttttttttttacgtttaaattttttaattttagaattttttacttacttgtattttattttttatttttttcaaaaattataaaaaaattatttatttaattattaagtaaatattttatttattcatttaaaaaataaaattctataacattatttaaaatttatctaaattttaaatatgtaaaatatattaaataaaataatattaaaaaacataatatattttaaataaaaaatattaaaaaatatataatatatttaataaaaccataaaaaatataatacaaatcaaataaaactaatagtatgaattttttccattttaattattttttatttatcacatttggtttatttaaaatttagataatcttttaataatgtcattgaattttttttaaaatgaataaataaaatatttatttaataattaaataaataaaattaataacattttaaaaaaatgtaacaaaataaaaaataaaatacaagaaattaaaaaattctaaaattctaaaattaaaaagtttgaacttaaaaaaaaaaccaaaatgactacaaagtcgtaaaaagaaaaataaaataaaaaaacaaaacttatcactttgatatcataataaaaaaaactattgactttgaagtcgtaaaaaaaacacaaatattgtaatcgattatcggcttcaaaatttaaattcaaatttctaaaggatgttgcaaaacgtttaaacctagtgatcgattacaagccttgtgtaatcgattataggctttaaaattaaattcaaattttataagagcattttagaaattaatttgatcacgggtaatcgattacatcccctgataatcgattaccagagagtaaatattacttttatgaaatctcaaaaagcttctggaaaatattctttggtcaaacctgtgcatcatcaattcataaactctttctaagattctaggaactaagttcatcaattatattgaatttctggattcttgacttggatcaaacgtgagaagcacttatctttgacatcgtcaaaacttcatatcattatatgcttctacaaaaatatgatattgatttttttgagaacaaaagttaatattctttttcacacttctttttatataactaattaattttcatatgataaagaaaataatattcagatttgagtacaattagaaatacatgacacaacaaccttttcaattgatgacaattaaatctaatcttttatatatatatatatatatatatatatatatatatatatatatatatatatatatatatatatatatatgagaatattattttgtgaattgaaaaattgatcaaaattaaatagctagattggaacgaaatatttttttaatatattttttaaccgaaatagtctttaaagtacaccctttttcctataattgattttttttttcctataatgaaacatcaaagaatactgggaaaggtaactgagtaagaggaagtgaagagaaggttaggaggggaaagtgtggtgacagagaaaaagtaccaagagatgtatgtgaatagtccagggaaaggtgtggttgataagcttaaaggtatggttgggacatggtttaccaacccagcagagaatcaatcttcacaaggtaaataacaatgaatagtagctctagttgtctccatgaggtttctcttggttgatcaatgctttttgcaaattttacttatttctaaattagtttattatattcttttaccatacttctctgactaattcttttgttactcttcacgttctgcttgagttttgcagttagacaaacatattttgtatcgatattaaaatttattttctctatatttgtcttgtgacattttttctattttcttatcttggaagaagtgttttgagaaacaaacgaaattatgattatgtatgtttctcttagtcttaagacttgattccaagatgaatcgcagttatttgtttgcttattttgggcatgcttgcatatttttctattatgttttttttttcattttgtaagagctgtttcaaaaatagtggagtatttattttctagtagttttagacttcagtccaagatgagttacagttttttttttttttttactttattttgggtatgctagtttttgctgaagcaaagtgccacattaattttgaatttgtggtttgcatgggtcgaagatttatctatgaattatgaggcaggaagggcagaagtggaacaagttaaccaaggtgcagcaggtgaaagaaggctgcaggagtcatctaattgaagaagggctttgaaggagtctttgctttgggtgattgtgtagattttcttaaaagctgtttcaatatctagccgtgtgtctagttctttgttggaagaaagttaggatgttcaagtcacagtaaaataaatatttgtgttttttttaatgtttatgtaaatatccaattttatccgggtttagttttatcttttaaataaaaatatttaaaatatttttgagaaaaagaaaagaaaaattatatatagaagatttgacagttacaagaagacttggcatcagaaaactggagtaatggtgattcaattgagaaaaaaataaaatattactaaaagataaggtcatttaaaatatttttgagaaaaagaaaaaagaaaaattatagaagattcttttaaataaaaatatttaaaatatttttgagaaaaaaaaaagaaaaatcatagaagatgtgacagttacaaaattgatattcagaaaactggagtaatggtgattcaattgagcaaaaaaaataaaatattagtaaccgataacgtcatcgaagttgtaagtctaaaaacaatggtataatggaatcctaagttgttcttggattataaaagaagagacgtactagcatacaaggaggggggcggagaaaaaaggagaattatgtgaaggccgggacacccatagaaagatttttttcgcaattctttcaaaagatgattatgatgctataagatcaggtccttgttcttttttctctataagatcaggtttgttcttttttttttcttttctcgttcatttcttgttatgtttggtttttttatttaatttttggtttcatgaattcgtgtatgtatgctatccaaatgtttattttctgaataaaataagtatatatattttgaccacatgtttaccttcatattatgggttaaaaagcatcattttttattacttattggtcccccgataaatatttattttttatgtttggtctctaataaatttttttgagaccggattcctaatatttgaaattttgtctcttatatttgttgttagtcccaaattattatctacctatgtggttgtttgaccatgatgtatgtcacgtgtggtgtcacttgtttgatttggattacacgtgagaaaaaaattttaaaaataaaaataaaaactatgtcgtattgtccccttcttctttctcctttctgtctccatcacccttcatcttccttatatctcaccattgtgtcatggatggtgtttcattttctcccccagtggatggactaaaggaaaacaagctaaatgaaagaatagatataaatcaacaaaatcttaacaacaaaacatcaaaccacaaaatgagaaaagaaaaattgtttggtgggcttcactaaggttcacggctggattggtagttggacttcatgtggggtttcacaatgaggtttgccatgagttggggctcattgagtttggcagtgacagtggagatcacagtctttgggttttatgatgggattgtgcacgcgcggttgagatcacagttgggctcctaccaatatttctaccctatgaataaagataaagaaatttctacactatgaatatttggaattaattaagattagctaattcaatctaaataacaatatgcaaaaagataaagaaattaagagaagaaataaaaataagaaacttaaggaaggaaataaaagaaaaaattaagggaatttttgtttgagaattttaacaaacactcctgtatgcaaagtaaattgagattaaatcaatgaaaaaattgtctaggtttaattttattggagttcctataaagtaatcactacacatttatatttaataaatgttatatcatcattaatctaccatattatcttaactttaattccttaagtgaagagacctaaatctcttgattaaactatcgattccttggattggcataaccaaaggatttgcattaagacaaagtgtttattaatgttctattatccctagacataaaaattattggatgttctctctaattcgctactcaaagaaatttttctattacaattgaataaaaaatcatacaaacatgtgttcaagtcaaaaacacatatcagacatataagaaaaacaattacaatattttactgaataaaagagtagtcatttcatgaaagaagaaccaattactgtacattaaactctaagagaagattagttcatggcaaaaaaaaaaacataagagatatacatcacataaatgtcttaaaatgacaccaaaatctaagaatacatgataattatctatcatccaaatttaatttaggataaaaagtaacattaaaattttatagggacaaaaatgatatattttactctatctttttcatgcttaaggtaactctcaacatttgttgtcagtcataaaaaacattgacatggatctgatggagtggctgtggttcatgttgaaaaagtagggaccttgatatagatttggtagagttgtctacggtttgtcaacaagataattttttttcttttattttatttcaaataataaaattttgataatttaaaattaattatagttttatattgcatgtaatagaagacttgaatttaataatgcaagattttttgttgtttactttacacaggtgcatgtaacgaaaggattgatttaaataattgttaaaatttgaagactcattattaaaccaaattttattacctttattgtaaactacaaatgattttttataaaaatattaatatttacttaaaataaaattttcattaatttaagcaattctacacgttaaactaataaaataaaatgtttcttattgaagagagagtgtgtgcatcctcctccatttatattcttgtctttgtccacctttggttatgtaggttaccttgcagagagagtgtgtgcatcccaagtgagcgtgagacacttatgaagtttaagaataatctgaatgatccttcaaataggctttggtcttggaatcctaataataccaactgttgccactggtatggagtcctctgccacaaccttacttcccatcttctccagcttcacctccacacttctgattctgctttctatcatgatgcctaccattatcgattctaccatagatttgatgaggaagcttataggagatggagctttggtggagagataagtccttgtttggctgatttaaagcatttgaattacttggacttgagcgccaattatttccttggagaaggtatgtcaattccttctttccttgggacaatgacttccttgactcacctcaacctctcttatactggattcaatgggaagattcctcctcagattgggaatctctcaaatttggtgtatcttgacctgagttatgatgttgccaacggaacagtaccctctcagatcgggaatctctctgagcttcgatatcttgacttgagctacaattattttgaaggtatggcaattccttctttcctttgtgtaatgacctccttgactcacctcgacctctcttatactgcattcatggggaagattccatctcagattggaaatctctccaatttggtctatcttggcctcggaagttatgatttcgagcctctgttagctgaaaatgtagaatgggtatcaagtatgtggaagcttgaatatctttatttgagtaatgcaaacctatccaaagcatttcattggctacacactctccaatctcttccttctttgacccacctatatttgtcagaatgcacactccctcactataatgaaccatccttgctcaacttctcatctctgcaaactctcgatctttccggtactagttattcccctgccatttcttttttccctaagtggatattcaaattgaagaaacttgtttctcttcaattagggggtaatgacatccaaggttcgattcctggtggtattcgaaacctcacacttcttcaaaaccttgacttgtctgtaaattcaattgcatcttctatacctgattgcttatacggtcttcatcgtctcaagttcctggacctagagggcaacaacttgcatgggactatttctgatgccctgggaaatttgacttctcttgttgaacttgatttgtcatacaatcaacttgaaggaaccattccaacttctttgggaaatttgacttctcttgttgaacttgatttgtcatacaatcaacttgaaggaatcattccaacttctttgggaaatttgacttctcttgttgaacttgatttgtcatacaatcaacttgaaggaaccattccaacttctttgggaaatttgacttctcttgttgaacttgatttatcagctaatcaacttgaaggaaccattccaaattctttgggaaatttgacttctcttgttaaacttcaattatcacgtaatcaacttgaaggaaccattccaacttctttgggaaatttgacttctctggttagacttgatttgtcatataatcaacttgaaggaacaattccaacttctttggctaatctctgcctcctaatggagattgatttctcatatctcaaactcaaccaacaggttaatgaacttttagaaattctagctccttgtatttcccatggactcacagcacttgcagttcagagttcacgactttcaggcaatctgacagatcatattggggcatttaaaaatattgacacgttacttttttccaacgactcaattggtggtgctcttcctagatcatttggaaaactttcatcattaacatatctcgatctgtctattaataaattcagtggaaatccatttgaaagtcttagatcgctttctaagatgtcatctcttcagattgatggcaataattttcaaggagttgtcaaggaagatgatcttgcaaatcttacaagcttgatggagtttcatgcatcagggaacaatttcactttaaaagttggtcccaaatggcttcctaattttcagctttcctatttggatgtgacatcatggcagttaggtcccaactttccatcatggattcagtcacaaaaccaacttcaacattttggactgtctaacacggggattttagattctattcccacctggttctgggaagcactttctcaggttttgtatttaaacctctctcataatcatatacatggtgaaattgggactacattaaagaatccaatatctatccaaactattgatctaagctcaaataacttgtgtggtaaattaccctatctttcaagtgatgtgtttcagttagatctttcaagcaattcattctctgaatccatgaataactttttatgtaatgatcaggacgagccaatgcaattaaaatttttgaatcttgcatcaaataatttgtcaggagagatacctgattgctggatgaattggacatttcttgcggatgtaaatttacaaagcaaccattttgttgggaacttaccccaatccatgggttccttggcagacctgtagtctttacaaattcgtaacaacacactctcaggaatatttccaaccagtttgaagaagaataaaaaattgatatccttggaccttggggaaaataatctttcaggaagtattccaacatgggttggagaaaagctcttaaatgtgaaaattctccgccttcgatcaaacagttttgccggcctcattccaaatgaaatatgtcagatgagtcttcttcaggttttagacgttgcacaaaacaatctgtctggcaatataccgagctgtttcagtaacttgagtgccatgacactaaagaaccaaagtacagatcctcgtatctattctcaagcacaatataatatgtcttccatgtatagtatagttagtgtgctactatggctgaaaggaagaggagatgagtatcgaaacattctgggtttggtaacaagcattgatctgtcaagtaacaaattattaggagaaatacctagagaaatcacagatctaaatggattgaactttttgaaccaagtaattttaaaagctttggtagtctcaatagtatttttgatagtgacaatagtagcccatatatatataaatgattatatgtgtgatacaacaaaatgcaggatagataaaacaacccataccaactatacaaattacaagttaattattatttttacatattttgatgtacaataaacagcaccaacacaaaaatgttatatttactagtagcagtagtaattaactagttttttatatataaaagtggtaattaacaactctttcatcacacatatggacccctccaaatacaattttttttttcatagtaaagggaatctgccgtcaatttagttctcactatcagatttaattaaaccactgctctaacgaggcacatatcctgttaataaatttagtatttttaatgaaaaattaaaataaaatatctcaataaataatatacatgcacttacacatataaaaatgttatttaaaccctgaactgaacacacaatgatatatgattataaattgtctaataaattataagttttgtctttcatgtatgcacaggtgtgtttcttcccaaattgtgcaaatgctcgtcgacaaatgggtgagatcaaaagctcaggtatggtagctccaggacctgtgcactctcttcaattcacctcaatttctccacaaccttttgatgctatggagctctcagatgaacctgccgttgctccattcccgcaatactaagtagaagtatttttcttaatgcttgcaagaaataatttaaatgagtgtattttgatgcttaatgcgtgtttagtttgtaataaggatgttgcgctgcacaccaatatgtagctacgtaggggatttggaatgtgtcattaatttatgtattctgttgtacaaaattttaatgctggaagtggtctctcagactcttcccattgaaaaccagtgtagtcggctttcattatttttggttaatatatataaattgttctttagtactgattggtctgaatagtgtgatagattctaactctttaaatgaatggttaagaatttcaattttatcaacttttagttcttcatggaatatgctttgtcacactatgtccagctcttgaaaatcattattttttgtcctttggattaataattgttgggctgtgaccaaaattcatatggaagtttatttttgttattttttcagttttttcctctgcttatataaagcaaggatgccctgtattttacatagaggataaacttccacttgtatactgcaaccataataataataaaaactttctgttttcctttccgtggatgtaaccttactcaaagtgaaccacgtaaatttgtttgtgtgttctttctctcatctctttctctttcattttgctgcaatctgtgtgtatgatatttttgttctgctgcatctactgttgctgttcttgtttgttcttcatcacttccataacaataattctaacctggatcgtgtttaccctattgatgcttacaaaatttagtgttttcaactccaatgcaagtcttggttttctcactatcaacaatgctctccatggtcaccaactttcctccacatgtaatctttcatctcttgaagtagatattaatgtcagtgtttcgccatgttctccattctttaaaagcttgttgcatgtgctttctaatgttaacaaaatgacactttcttggaggacccttaggatgatgctatttttaagttttattttgtatgttttgtctttttcggtatatgtttgaaagtaatttttttctatacatttttaaacttcttattatatattctaataaagtgctgaaagttatattcctatttcatgcttaaataatttggtaaatatttcttttatttccctttctttcttatgctctcttgaaagaaattataggatgttttatatattgtggggagtgtaaaacacaaacttttcttatatattcttttgaacgtttacataaaattcttaaggtgaagatttaattttaaattgtttagttttttatttcattttattattaacttattccttttttttggtccaagattaacttattcccttatgctctcttacgtcagattatagattgttatattgtgagtgctctgtttgtaatgtatgttgcgtttaattggcttttacgtaagatgaaagtttttgattctaagaaactatttgagtgaagcaggggaacaaaaatctggtattcatattaagaaatacattctttggtgatgcagcaacacaatgtagtgccagtacatgatttgcagagcattatttgagaaaatagtatcaaataatgacataatcaattggtatcgtttgtgtgtgtaaaatagcaaagcaagtagcgtggcaagagcaggagtttgaataagaaataaatgttgagcatgttaaatcaacaaaacaagattgtaaataatgatttaagaatatggctgaaaacaaggatgtgatccaacactaaggtagaaaataaaagcatgttaatcaaatggcaagccaggacagaaaaatctttatttagtactttgtagagactaatagagataaggaagggaaggtggaatctgggttagtggagtagatctaaattcataacaacacaccctcaggaatatttcctaccagtttgaagaagaataacccattgatatccttggaccttggggaaaataatctttcaggaaatattccaacatggattggagaaaagctctcagatatgaaaatcctccgccttcgatcaaatcaaatgaaatatgtgagatgaatcttcttcaagttttagacgttgcacaaaacaatctgtctggcaatatatgtagctgtttcagtaacttgagtgccatgacactaatcaaccaaaatacagatcctcgtatctattctcaagcaccaaatggtacagattcctcttccacatatagtatagttagtgagctacttttgctgaaaggaagagcagatgagcacagaaactttctggatttggtaacaaacattgatctgtcaagtaacaaattattaggggaaatgccaagagaagtcacagatctaaatggattaaattttttaaacttgtcccacaaccaattgattggtcatatttcacaaggtattgataatatgggatctttacagtccgttgatttttcgaggaatcaactttctgctgaaattcctccaacttaaccatttcaaatttgagctttctgagcatactagacttgtcttataatcatttgaagggaaaaatgccaacaggaactcaattgcaaacctttgatgcctccagctttattggcaacaatctatgttgtccaccactgcctataagtgtagctccaatgtgaaaactcatagttatgaaggaagtgatgggcatagatcagttgcttaactttgaaattgatcccttggtgcttgaatctctcttgaaatgagatttcaaatattcacacatattactgggtattacatccatttccatccaattatgagtgcatattagaattggctgcctttggagcaaatttgtttccaacaatgacgaaggtgattgtagaagattggtaggaggaggttggggtttccgtgtgctatgtcctacgataaatctgcaggcataaaagaatccaacggatataaaaataaataaatcattttacagagtgatctttaaaaatgaaattctgataagaagattgtgataaaaaacatggtggtgaaaataataaaaaacatgcagctgccaaatttgtttccaacaatgaggatggtgattgtagaagattggtacgtaggagggggttggggtttgggtgtgctatgacctacgataaatctctaggtataaaagaatccaacggatgtaaaaaaattgttcacagtggatcacttagacgtcgtctcttttacagagtgatctttaaaaatgaaattctgtattcatgtttgcgttttgaatgtttcttcttttccttgatgtatttatcatttataaaatttttgtagtctatgggctatggttcaagttgaagtcagagacaataataacatggctggactttgtggactgtccaaaggtttaaaatgaaaaaattaaaaactttgagatagacttgatggagtgggccatggtttgtttagaagacaattttcttttacattatttttagtttgaatattgaaaatttgatacaacaaccattccaattaatgacgattaaatctagtctttttttaatatataagagaatattattttgtgaattaaaaaattaatcaaaattaaataactagatatgaacgaaataatcttttttatatagattttttaatcaaaatagtctttaaattagacccttttcctataattgatgtatttatcatttatatattttttgtggcctatgggctatggttcaagttgaagtcagagacaataacatagctgtactttgtggactgtccaaaggtttaagatgaaaaaattaaaaaccttgagatggacttgatggagtgggccatggtttgtttagaagacaattttcttttacattatttttagtttggatattgaaattttaataatttaatattaataatgggttgggatatcatgaaatagaagacttgaattttttttaataaaatgttagacttttattgtttaatcaacaaaattttatgaaaggattgattaaataatagttaaagtcaatacaaaattttgtgtatataggatttttaaaaaaggagatagataaagtaaattcaaaattagttcctattctagaaattaagtcgggagaattcgataataaagtcaataattaaaaaaggcaacgtaaaaaaaagaaaaaagaaaagagagacgcttgcatcagtataaataatagaaagaagtaagtttaatatgcagaagcaagaagcacttatacaattaagctgtttcatatatccttgtgtgatcatgaattcctcctccatttatattcttgtctttgtccagctttggttgttcagcttaccatgcagagagagtgtgtgcatcccaagtgagcgtgagacacttttgaagtttaagaataatctgaatgatccttcaaataggctttggtcttggaatcctaataataccaactgttgccactggtatggagtcctctgccacaaccttacttcccatcttcttcagcttcacctcaacacttcaccttctgctttctatcatgactactatgatgatggattctaccgtagattcgatgaggaagcttataggagatggagctttggtggagagataagtccttgtttggctgatttaaagcatttgaattacttggacttgagcggcaattatttacttggagcaggtatgtcaattccttctttccttgggacaatgacctccttgactcacctagacctctctgatagtggattctatgggaagattcctcctcagattgggaatctctcaaatttggtgtatcttgacctgagtttagatgttgccaacggaacagtaccctctcagatcgggaatctctctaagcttcgatatcttgacttgagctacaattatttacttggagaaggtatggcaattccttctttccttgggacaatgacttccttgactcacctcaacctctctcatactggattctatgggaagattcctcctcagattgggaatctctccaatttggtctaccttgacctcggaggttattctgatctgtttgctgaaaatgtagaatgggtatcaagtatgtggaagcttgaatatcttcatttgagtaatgcaaacctatccaaagcatttcattggctacacactctccaatctcttccttctttgacccacctatatttgtcaggatgcacactccctcactataatgaaccatccttgctcaacttctcatctctgcaaactctccatctttcccttactcgttattcccctgccatttcttttgtccccaagtggatattcaaattgaagaaacttgttctcttcaatttaggggtaatgaaatccaaggtccgattcctgttggtattcgaaatctcacacttcttcaaaatcttgacttgtctcaaaattcattctcatcttctatacctgattgcttatatggtcttcatcgtctcaagtatctggacctaaggggcaacaacttgcatgggactatttctgatgccctgggaaatttgacttctcttgttgaacttcatttgttatataatcaacttgaaggaaccattccaacttctttgggaaatttgacttctcttgttgaacttgatttatcaaataatcaacttgaaggaaccattccaccttctttaggaaatttgacttctctggttagacttgatttgtcatatagtcaacttgaaggaaacattccaacttctttgggaaatttgacttctcttgttgaacttgatttgtcatatagtcaacttgaaggaaacattccaacttctttgggtaatgtctgcaacttaagggtgataggtttatcatatctcaaactcaaccaacaggttaatgaacttttagaaattcttgctccttgtatttcccatggactcacaagacttgcagttcagagttcacaactttcaggcaatctgacagatcatattggggcatttaaaaatattgtgctgctagatttttccaacaactcaattggtggtgctcttcctagatcatttggaaaactttcatcattaagatatctcaatctgtctattaataaattcagtggaaatccatttgaaagtcttggatcactctctaaattgtcatctctttatattgatggcaatctttttcatggacttgtcaaggaagatgatcttgcaaatcttacaagcttgacggagtttggtgcatcagggaacaatttcactttaaaagtgggtcccaattggcgtcctaattttcggctttcctatttggatgtgacatcatggcagttaagtcccaactttccatcgtggattcagtcacaaaacaaacttgaatatgttggactatctaacacggggattttcgattctattcccacacagatgtgggaaacacttcctcaggttttgtatttaaacctctctcataatcacatccatggtgagagtgggactacattaaagaatcccatatctatccccgttattgatctaagctcaaatcacttgtgtggtaaattaccctatctttcaagtgatgtgtctcagttagatctttcaagcaattcaatctctgaatccatgaatgactttttatgcaatgatcaggacgagccaatgcaattacaatttctgaatcttgcatcaaataatttgtcaggagagatacctgattgctggatgaattggacatttcttgtgaatgtaaatttacaaagcaaccattttgttgggaacttaccccaatccatgggttccttggcagagctgcagtctttacaaattcgtaacaacacactctcaggaatatttccaaccagtttgaagaagaataaccaattgatatccttggaccttcgggaaaataatctttcaggaagtattccaacatgggttggagaaaagctcttaaatgtgaaaatcctcctccttcgatcaaacagttttaccggccacattccaaatgaaatatgtcagatgagtcttcttcaggttttagaccttgcccaaaacaatttgtctggcaatataccgagctgtttcagtaacttgagtgccatgacactaaagaaccaaagtacagatcctcatatctattctcaagcacaattttttatgctttacacttccgagtatagcatagttagtgtgctactatgactgaaaggaagaggagatgagtatagaaacattctgggtttggtaacaagcattgatctatcaagtaacaatttattaggagaaatacctagaaaaatcacaaatctaaatggattgaactttttgaacttgtcccacaaccaattgattggtcatattccacaaggcattggtagtatgggatcattacaatccattgatttttctaggaatcaactttctggtgaaatccctccaaccatttcaaatttgagctttttgagcatgctagacgtggcttataatcatttgaagggaaaaattccaacaggaactcaattgcaaacctttgatgcctccagctttattggcaacaatctatgtggtccaccactgcccataaactgcagctccaatgggaaaactcatagttatgaaggaagtgatgggcatggagtgaattggttttttgttagtgcgacaattggatttattgtgggattctggatagtgattgctcctttactgatttgtagatcatggaggtatgcctattttcatttccttgatcatgtgtggttcaaacttcaatctttttactcatgtagtatcagtgtttagtgttgcttagaatacaccgatgttgtatcattgtattggcaggttgatcaatttatgtcaacaaataaatttaaacaaactaatccattatatttcaattttcagtaatgtgttatatttaatggataagagttgtaccgtgggaattgttgtcattgcatctacatacacaagtgtatctatttttttttaagttatgtttctttgaaatttattcatatgtttgaatctctcttgaaatgtttgtatcattgtattgccaggttgttcaatttgcattgtactcattgctattttctttctatcttttttttttcaaatttgagagtcttatttaaattctgttttgggatgtacatatttgcatattgagcatatttgtagttaagatcaaatagttgtaattcggtgtatcaaatggggaactagtggttcaagaaaacgtggtttaataggaaaaaacttatatttaattttagtcactaaccattgaagtgaataattagttctttcgtgttaattaaagtcgtgactcgtggctgcatacaagacttgactctccaagccggccaggccaagaactttgatgagatatccatagataaccaatgatgcttgagaaccaacaaaattgttggagtaatattctaaattaccctaactataaaaagggcaaataataggtgtaactttttaagtattattcgttttgctttttcaatttttactttatctaataataaaagtcaacttttaaaattaattatcaaatttaaatgttaactttacttaaaaattaacacaaaaaatactaaagaatttatctttataaaacaatttttttgaagagtcaaaatgaattaatattcaagtgttccaggatcagtattaattacaaccaaaactaacggaatatgaaacctgaaacagacaagtgataacaaaatcgcaggaagtatcttggctaattttttatttgataaatatataaatttttggaattcatttttgtaaatatttaataaattttttatctttacaaaattaaaatgtgttattggtcagaatgtagattcagataaatttaaattatgagtttttatattgattatacatatatataatcgatagtaaattatatttacattaattatacatataatcaaaaatgtaataaataatttgaaatgtttaaatcttacttcaacaaaaaaaaaatattttaattttatgagaacgaaaaatatattaaaattttatccagataacttttcaatattttaatatttataaaattaaaaatatatgttaaccttataaaaatatcaacaaataaacaaaatgtcttttgtttgacagttttaagaattaaataattgatagtaatcataattttaaaaaattaattaacttattatacaaaatgttgagctaaagatcaattaagggtatttttgaatgatcatggcccaagcattctttgacaaggtcactgcccatgaaagctaccgatatcgcatcaacatttactcacttcttccattaaaaggcactggaggctgaaagtcgtaatcttcatttttatactttttagattatacaaagttggaaaaattaaaacattatgtggtgggcgaattagtgaacaaaaattataagatctgcacaggttattctaatttaattctaattaagaaattaattatttttcattttactccctttatgacaaatttaatttttacttataagccggtctgtgataaaccttgtaccatattttaaagcaaaccataacacatcataaaacttagtgatataattttagatgtctttgtgtgtgtgagatgtattgttaatatttatagcatccttcctcataaaatttagcgtgatgtaatgttaatgtttacgaccaagctaaaagtacaaaaaaataatttttatctaaaggttttcttgtaataaatataatgggtgaaattagccataatcaaattctacttttttttatttcctttttatatacagtgccatatataacaggaaactgaatttgtccgttttcacactagactaacagcgccaagaatgagaatgaacgtaattttctgcaactttgatctgtagactctaggttagtattaaaaacataaaacaaaatattactgtaaacataaagatgaaaattattgagtctaacctttttttttatgaaaagaggagagtataagggaggaaaggaagaaccaatagaaaaatcaatttttgattcaaaatgttcttgcccctgtagctcaatggtacgtagagacttcagtcttgcaaactgaaggtctgtagttgcacactatgggggcatccaatattattaattttttttcacttgatcatgaaaaataatgttgtgttatgatataaaaacatcatacgtaattttcagcatgagatagtttctgtatgaggacccagtataggagcaatctttttgttttctttcaaacataaagtatcgcaggtagtttggagcaacaggttctccattgactagtagtagtagctagtgaccaaacttaattcctcattatcatagccatcatacaaacctagctcacactgttcacttgcatcgatatgatcttgtctaactatcacaccataaaacactaagtgtattgatcaattaatgtaatcttattttagtttaattggaagttttaaattttaatcttaaatatataattacattaaatatttatatataaaaatgtatcatctataataattctatttctattgaacaagtagattatctttaataaaaaataccttgtgatttaaaaataaaaaactataacacagcatcaatttttacattgctaattaactaaaaataattctaatttttatcattgaatgcatgaattatatatttgacatacggttctatcttaattaaattgatcaaatattgtaacaaaaacaaattgatctaatattgtatgtagttacttttgttttctatttatttttatcttttatgaatacgcatctaaaaaacattttcagaactgaatacacaaaatgatatacgattataaattgtctaataaattataagttttgtctttcatgtatgcacaggtgtgtttcttcccaaattgtgtgcagtagcagaaggtgcaaatgctcgtcgacaaatgggtgagatcaaaagctcaggtatggtggctgcaggacctgtgcactctcttcaatttctccacaaccttttgatgatgtagagctctcagatgaacctgccattgctccattccctcaatactaagtagtttctcggactcttcccattgaaaaccagtgtagccagctttcattattgttggttaatatttataaattgttctttagtactgattggtctgaatagtgtgatagattccgactctttaaatgaatggttaagaatttgaattttatcaacttttagttcttcatccttctacgaaagtgattattagtctctcaattatcttttgggcggtgttaatctataattctgtttgtcattgctcagtcactttcataaataaaaaatcactgttaaataatgatgatgtgataatcatatgatttctcacttgggttatgacgtaaaaatcttgtgacaaaacgttgttaaggtattacaaatattttgtcatcagtgtaaaactgccaaataattaaaatttaaaaaaaaaaaaagaaaaaggatatataataaacaaaatcaataattcacaatacacaaattaaccttttaacatgtgattattatatcaaaacctttttttttggtacctttcaatttgtcattcaagtctagaaggacctacgtgtggacatctaaaggagtccatttatgagtgaaaattttcaaaatttgtttatcgtatcgtagcaggctaagttggattttatattgctattcacattacccatgtgggtagaaaattagaaaattctagaagtattctttttacataaatatgattttgttatacaaatatacaatagaattatatttttattacattgtttgggacacaattctagaagtagttttttgtgttcagtttcaaaatcattaaaaattaacctcagtttatgtttggagtttttagtttcagtttattttaatttttagatattaaaaaattatttaatagataaaataatttaaatatttaatcttatcacaatccaatataaaatcatgtaatattaaaaaaatattgatacaaaaataaataaaaaaataattaaacataataaaaataatttaaaaaatattataaaaaacagtaaaggttaaaacataaacaataatcaataaattaaacaaaattttattgtttgttatatgtgataaaaaccatatcagaaagatgtaaaaaatcaacttagtgcaatttttgttgaacatgtttgtatttcaaaattatattttaaaatggaaagttgaaaattgacaatcacccctaacgcgaccttaatttttaaataagtaaaaagtattgtatgttgaaagaagcagttgatcatatgattgacgcccaagtaaattgaacaaattaaagctgcagaaatcaattttcaatgatctgtcattgcttacttaagctatggataattacttgatttatgtctcattacacaattttggaagatcagctggtaaaaatgtataataaaatttattgtggcttaaaataatgcggtgtttgattttgtgaggtccttaagtggcaaacatatggtgtgatccacaagttccgtaacaattcaaaatagaaggttgaattgctctaggaatcctatcatcttacaagatttaacattttcaatctgtgattcttctttacatgggtgtcaatcatagtatatggtggttaacaagttgcatttagcaagaatttcttgagttgcttctaatcaattctcatgccattttattaatgtcttatggctaacagttggggcaaaaattgatattaccccattgagaaatatatctctaggatgatgactgtccacaattatccaaaacacttcagtgcaacaaaaactcaatatccatctgctggaaggaacgatcagtttctaactcgagcaatcatggtatatgggagttcgctgactattttccacaatgtcagaatctcctatttgaccccatgttcaaactcgattaaaacaaatgcccttggcatctttgaccacaaatgaagaatagttgcagaaatttggaaatgaaatcttaaggtttgggttaagggtttgtaaaatataggtatttaatttgcgatacaaatgtcatattatatcgtaggagaggcaagacgaaggccacataatcaagaaagttaactatttaagctaacataaaacttggtgagaacctatggattgcaaacaagcagggaagtatcaagtgagtttttttttttcacatgaatgaaaaataaatattaaccattagattttatcatgaatgatcaaattaaaatctaggacaagtgtaaaattacttacataaatcaatggtatctaatttaattggttgaacaggtgcataaattattgtaaaattcactagtaattatctttgatttctatggataaaaaacttacataaacttgtttttattatccatttaattttagtcttccattgaatcaatatcaacctggataaattcataaaaaggtatagattttgttattatcaagggtatatgtattggaaggaaggtgtaaagttttttggcagtatatgggtaatattttcattttttttctatgatcatgatcaaataacattttgacttttctttatataggttttcagaataagagggtttagtggtaattaatattgaaatcaacagattttatgacagtccaatgatgttttttaataagaaatttttttaggtaaattggatccgagataccaactaagactagggtagacttcttgagagcatttacaaaaactaagataacctcaagacacaaagaatacttggaatgatatttataaattacccatctcaaatgatatttgaattggagttattacccttgataaattacatatccttaaaaatcttgtttttgtcggtaataactccagagtgttctatgtcatgcgataggggcaacaagtctgtggtattcagatcagcttcagccatatcagttgtaattcttgatatccttcctcaagaatcagaggcattgaagttggcttcgtctcttaaattaatatcaagcaacaaattctgaagttttagatcaagctctgccacagatgaattagtttcctttttctttggttttcttttctgaatattttgtttcttccgttgagcttttctttcctcgaactccaaaatcttctcacgacaagcactgtagatgattaataatgagacaatgatgaaaggcaccctaaacaaaaagttatcttatatacccaccagccttcttgaatttgaattgttctaaaagatacttggtatagatgcagcaataaaccaaacagcatactaactcaagttgcaagcaaaaaataagcaaaatatacatttgataagaatcagataaaacatttcctttctgtgttttagggagtaaagtatgttcatgaattatgaacttacattacctttctataagatctgcaggtactattgaagtttcaagtccatccattccttcccaagaaacctcgtagcattctctcccttgaactcttcggctcttaatgatttctgacacaggacacttcacagggatctgtgatcggatataatataaataagattcttgtatatatccaggttcaaaaatagggagcctgtagataaaatttatgttcactaataatagtaatggcattatagaaactcgatgaatggaagatttccctgtttattgatgatacactgaatgcagtagaagctactgtaaatcaatgatcatcgaagaattgaaccaatgttatacaataccaaaatagaaaatgtgtagcatacttacattacttaataatccaatggacagctttgatagataatgaacatgtgaaagagaacataagttatcaaaatgccacgcgattctaagcatgagcagtcactcttttatttagtttaaaataatttttaaatattaaaacttttcacatgagctcagacagtaatgaaatgttaattagggagtggaaagggttagcagtacctcatgtaaaggaaggttcagtccaacttcagatgaagttaaacgcaaattggcaaatcgtcgtaaatttctttatgagtatattgaatatatttcaatcagtattaagaatcaatctttatgagtggaaaccatgaataaaaaagacaaacctacttgtgcacaatatctgaatctgcttggtgacattttgtgttcatataagcattaattacttgtaaaatgttatcatccggccgtaaatcattcttacctcctgcatagacaaaagatagaagctaagatacaatgttcaagagacaccaacaatcctccatttgacaaaaataattattaactgcaagtcaacatttgtgtacaagttgatgcagacaatgcattctagaagacataaaaaaagcacaaagatattaggtatataattccatcctttggtttagaattagatattatattgggtccactgtaacatctctcattgcttaacaatttacatttacatggacagtaatcagttagtgttaatttaacttttttctaatatactaatttagctgatattatattttcagatagtgcatataattggttcatgacatggtatcaaaacatgcatgattaatagcatgtttgaatctaactccatgatccacattgtccaagaaatttgagtcaaaattttaaaaatgacacaaaagcaagtattttttgcttcaatattaatttgacgtgcattcacaacaatgaacaccaaaccaaacgggcactaagtggtctagagtttgatcattgttacccccatttttctaataaaaagtagaatttcaaaacaaggtaggtgagcatttacattatttatgcttcaatccaaaaggttttggtgttttactagtggaaagggacatgtaagagactcaataattcacaccttaaagtttgcatttattatgtacaaatacagttaatatcctataaatcaaatcctgatacgtttgttgacaaaattcttttaaaaacattaaaacctctcttctatgtcaaatattaagtgtattattacataatttggacagctaatatgtccctaattctctgaaaagtttacttgtatagtaacactagagcagtgccataaactgttttctagtttgagaaggaaacctgtcagaaaaaataatcaactgcaactttcaattcaagtaatgtgaattgaatactccgaagacggtaatatccccacacttacaagttacaatgacaaatgttgaacatttttcatgtgacatacagacatttacccccttaactaaaaaaaaagacgataaaaaatatcaaattaaattgtagtgaaaaatgaaactattaattttaattaaagaaaatactacttatttattccttccaataatcaaatattttctcattaccaacttgtctcattcatctcttatctactactaattgttacttgtagttaagtgtgttagattcatgggttaacaatgagtcatgtatgtaattaataatcattaatgtcatatttttttatcatttgaagtggagtattcattttttctcttaatattactttatccttcacaaaattcaaataagatattttatttgagaggatgaattcagaaccactcaaactaatgagttaaggacttattggttattaacatcgaattaaaactagttttatgtattttgtttttataaattaaagactaatacttggttattgtcattattcaaaaaagaaaaaaggttaaaaagaaaagaaaagtgagtgagaaagacacactcgagtcgagcgggagtcaaagctggaagtggcaaatggtaaagagttgggaacgagaaatccaaaattttgcaatatatgtcggggacaaatctgtcatttgactctccacatgtgttccttccaattttcaatacagttaacaccagaattatctttctctactgaacctaacattcagcacacttcaacaaaaatccatgaccaacacttgccacaacaatttagaacaaattcaacacatactctttgtgcttcagctggaagtcatgatcaatttctaccagaatatccaactcaaaccaataccccacaaacctacaccaccacccaagttgaggagccacactaagaaccatcaaacgagagcagttacacagataaaatctcctcagcaaccacagcaatagctgacaaagccatcactgccaaaaatgttgtagcttcaaagctcggatacagtgatgacaccaccgaaacaactcaaacaaagcatcaagaagagaacacaagcaatgaaaaccgttaacaatctcatcagcaacctcagccaaaagcactgtcacttcgaagcttgtatatgacgctgacaccgaaacaactcaatcaagggatcaccaagagaacacaggcagtgcaaaaccatcaacaatctcttcagcaacctctgcaatagctgataaagccatatcagccaaaaacaccgtctcttccaagctcggatacggtgtcaacaacaccgaaacaactcaagcaagccatcaagagaacacaaccatcaacaatctctttagcaacagcttgcaatagctgataaagccgtgtcagcaaaaaacaccgtagcttccaagctcggatatggcaacaacactgaaacaaaaacaactcaaaccactcaatcagcaacctctgcaatagctgataaagctttctcagccaaaaacaccgtagcttcgaagcttggttttggcgcacagcaccaacaacaccacaagagaagagaactgaccatgctgctgctcctacagaatatggaaaaagtgttgctcagtctctgacagagaaactagctccagtttctggaaaagttgctggtgtaggaagtggtgtgaagtccaaagtttctggaactcaaactagtagtgtgggtgtggaacaggacaagggggtttctgtgaaggactatttggtggacaaactgaggcctggtgatgaagacagggctctctctgaagtgatatcagagactctgcacaagaaggaactgcccccagtggaagttactgaagaaggtgtgagaaaggtggtttctgatgctgtgcataagagagaggatgatcctgagagaagaatggaacatcaaagaatactgggaaaggtaactgagtcagaggaagtgaagggaaggttaggaggtgaaagtgtggtgacagagaaaaagtaccaagagatgtatgtgaatagtccggggaaaggtgtggttgataagcttaaaggtatggttgggacatggtttaccaacccagcagagaatcaatcttcacaaggtaaataacaatgaatagtagctctagttgtctctatgaggtttctctagtttgatcaatgctttttgcaaattttacttatttctaaattagttgattatattgttttaccatacttctctgactaattcttttgttactcttcacattcttcttgttttgcagttagacaaacatattttctatcgatattaaaatttattttctctctgtttgtctattatatttgtcttgtgacagtttttcgattttcttatcttggaagaagtgttttgagaaacaaacgaaattatgattatgtatgtttctgttagtcttaagacttgattccaagatgaatcgcagttatttgtttacttgttttggtcatgcttacatatttttctatatgttttttttttttttcattttgtaagaactgtttaaaaaaaagtggagtattttttatcctagtggttttagacttcagtccaagatgagttacaattttttttttttttactttattttgggtatgctattttttacttaggcaaagtgccacattaattttgaatttgtggtttgcatgggtcgaagattcatctatgaattatgaggcaggaagggcagaagtggaacaagttaaccaaggtgcagcaggtgaaagaaggcagcaggagtcatataattgaagaagtgctttgaaggagtctttgctttgggtgattgtgtagattttcttaaaagctgtttcaatatctgtgtgtctagttctttgttggaagaaagttaggatgttcaagtcacagtttatttgtgttttttttaatgtttatgtaaatatccaattttattcgggtttatttttatgttttatataaaaatatttaaaatatttttgagaaaaagaaaagagaaaaattatagaagatttgacagttacaagaagacttggcatcagaaaactggagtaatggtgattcaattgagaaaaaaaatattactaaaagataagatcatttaaaatatttttgagaaaaagaaaaaaagaaaaattatagaagattcttataaataaaaataattaaaatattttggagagagaaaaaagaaaaaccatagaagatctgaaagttacaaaattgatcatcagaaaactggagtaatggtgattcaattgagcaaaaaaaaaaatattagtaaaagataacgtcattgaagttgtaagtctaaagacaaggagatcgtggtataatggaatcctaagttgttgttggattttaaaagaagagacgcactagcatacaaggagggggacggagaaaaaaaggagaattctgtgaaggaaaacccatagaaagattgttttttcgcaattttttcaatggatgattatgatgctataagttcaggtcgttgttctttttgcgctctataagatcaggtttgtttgtttgttttttttcttttctcttgttcatttgttgttatgtttggctttttttatttaatttttggtttcatgaattcgtgtatgtatgctatccaaatgtttgttttttgaataaaataagtatatacatttcgaccgcatgtttaccttcatattgtgggttaaaaagcatattttttacctgcttattgttcctgataaatttccgtatataaaacagtaagatcaagtgtcgagtttacaaggactttaactgtaccctgagtttgtatatgttcaattttaagtaatcaataaattaaaattgatatttgtcaaataatgatacggaatataaaatttgacataaatgaagataattaagcataatacattaaagagatagaatacaaacactcaggagtgggttgtcaattgaagtaggattacagaatatgttgagactcaacctatcaaaactactcttgatgcaacattaagggttttttactacgttattttgattattaccttcatccactaacataccctaatcatgatttctcatgtgaaagagtttaaattacctaatttcactcctaatcccttaagagctatatcaaataattttctttaagaataaagatgtataataaataaggcaaaataatatcattctattcctagacactaattacctagatgttcataggaaataaacattttccaatgcataaaccctataacactacatgagaataggtaataaagctataaacatgatattaagcacagaaaagacaataatattaaataacattaaataaatagttagaatcattacatcaagagtgtttgatagttgaactcccaacaatggatgatttagcctctcattgtcatgagagggttactaatacaaaaagaaagcaagaggtgtgaaagaaaatggaggaaagggtcccaagtgaatggattttctctcttctctcgtgtcttagcttctcaattttcgtccccctaaagaattgcttaatttttccttttttttttcctttaaaatgaagcacaatcatgttttgtgatattgatcgtgtgctaagccagcatgtgctcgcacgaagtgcacatgcaaagtccatctgacataagtgaatgtgcgttaagccgcaaggtgcaggctaaaccgcagatgtgtactaagccgtagatgcgcactaagtcatcgtatgcgcgctaagcttgacctccaagttggctcctcgcgttgagcggttgttgacgcgctgggtgagctgctccagttcttcaaccatattacaaacctcctactatgtaattctataaaaaaaaatacactaaaaaatactataaatttgatagctttagcatttattggacaaaaactcaaaagaagttaaatttctaatgttctaacacaaaataagcaataaaagagaggaaaattggataattgctatgtgatttaaacatatttaaattacataagcatatcaattaacagattatacgtgggaaaaagtttttttaaaataaaaacaatgttgtattgcccatttcttctctctcttatctatctcttcatcacccttcatcttcctcatatcccactactgtgccactgatggtgtttcatttttcccccggtggttggactaaatgaaaacaaaatagatgaaagaatagatatgaaccaacaaaatcttaatatcaaaacattaaaccacaaaatcgagaaaagaacaactgtttggttggcttcactaggtttaatggctggattcacatttggatttcatgtgggatttcacaatgaggtttgtcgtgagttggggctcattgggttttgcagcggtggtggcagtggagatcacagtcgttgggttttatgaccggttgcgattgagatcatagttgggttcctaccaatatttctacactatgaataaagataaagaaatttctacactatgaatatttgaaattaattaagattagctaaattcatctaaataacaatatgcataaagataaagaaaattaaggaaggaaataaaagaaaaaattaagggaaaattttttgtttgagaattttaacaaacacttgtgtatgcaaagtaaattgagattaaatcaatgaaaaaattgttcgggtttaattttattggagttcctatcacgtaatcgctacacatttatatttaataaagattatattatcataaacctaccatattgtcttaactttaatttcttaagtgaagagagctaaatctcttgattaaactatcaatcctttggattaacataatcaaacaatttgcattaagacaaagtgtttattgatgctcaactatccctagacataaaaattattgggtgttctatccaattcgcaacttaatggaatttttctattacaattgaatgaaaaatcatgcaaacaggtgcaatccaaaaacacatattaggcataaaagagaaacaattacaatgttttattgaataaaaaaaagtagctattacatggaagaagaaacaattacattaaactctaagagaagattagttcatgacaataaaaaaacatgagatatacatcacataaatgtcctaaaatgacacaaaaattaaagaatacatgataattatcggtcatccaaaattaacttaggataagaaaaagtaacatattaaaattttataggaacgaaaatgatatattttagtctatttttttttaatgcttgaaataactctcaacatttgttgtcagtcataaaaaactttgacatggatttgatggagtggcctatggttcctgttgaaaaagtggggccttgatatggatttggtggagttgtctatggtttgttagaagatatttttttcttttattttattttgaataataaaaatttgttaatttaaaattaattataatttcaaattgcatgtaatagaagccttgaatttaataatgcaagactttttgttgtttacttaacacacgtgtaatgaaaggattgatttaattaatggttaaatttgaagactcattattaaaccaaattttattacctttattgtaaactattaatgttttttttataaaaatattaatatttacttaaaataaaattttcattaatttaagcaattctataagttaaactaagaaaataaaatgtttcttattttagtatttggcacaagaataaattacatttctttgtagattatttaagttatcgtatgaattattttttacgaatattatattgaagtgagtatttttatgattgcttaaatttggcacttaaaattatttaaaaagtaaaatggaaattaaaattatgctgctcctattatttaagctgacaacttgtaaagaaaataaaaaatatgatactaatttttatgataaaaaaaataataatattcaataaattatatatttatttttctcttctatcactattcttaaaatatcaccacataagtaaatgaaattcaggaaaagattttaatatatgaagacttgtggtctaaaaattaaatagccaggaccatagataaataatttcaaaaacatgccacacttctagtagatcatatcctctaatttacattttaagttaaatgtgatctacaatacgtgaagaaatttggaccaagacttataaaaggaaaaactatgattcaataattatgatagaccaagttaaacaagcattttacacttttttttatctcactaattaatttttaatgaaaaagaaaatactatgcaggttaaaatacaattagaaatagacgacataacaatcttttcaattaatgacaatgaaaattagtcttttttcacatataagaagaatgttattttgtgaattaaaaaatggatcaaaattaaatagctagataggaacgaaatagtctttttttatatagattttttaactgaaataatttttaaattagatccttttttctataattgatgtattcatcatttataattttttccttgcttacttaattctaaacatttgtagtcaatgataaggaacttgatatgaaggtaatgtggtgacctatggttcaagttgaagaagtggggggacaatgacatgaacttgatggagtggcctatggactatggatgaagttgaagaagtcagagaccttaatatgggtggactttgtggagtgtcctaaggttgaagatgaaaaaatggaggaccttgacatggatttgatggagtagtctatggttcaagttggaaaagtggggaccttgatatggatttggtggagtggccagtggtttctctaggagaaaatcttgttttcatttcttttattttgaataataaaaatttgatagtttaaaattaattatgggttcaaatttcaagtaatagaatatttgaattttataatgccagactttttgttatatacttaacacaggtgtaacaaaagaactgatttaaaataatagttaaaatttgaagacgaattaaactaaatttaattacctttgatgtaaattactcaaagattaaaaaaattattaatattttcttaagataaatttttcattgatttaagtaattatatacggtaaattaaaataaaaattgtttcttattttagtatttggcacaagaataaattatatttctctatagattgtttaagttattgtatgaatttgttttttttttagaatattaaattgaacgtgagtatttttatgatattttaaatttgacacttgcaattatttaaaaagtgaaatggaaattaaaattatgtttctcctcttatttaagttgatatcttgtaaaaaatacaaaatacaataccgatttttttagaaaaaaagttaatattctttttcacacttctttttatataactaagtaatttttatatgataaagaaaataatattcaaatttaaatacaattagaaatacatgatacaacaacctttccaattgatgacaattaaatttagtctttttttatatataagagaatattgttttgtgaattgaaaagttgatcaaaattaaatagctagattggaacgagataatcttttttttatatagatttttttaaactgaattggtctttaaagtacaccctttttctataattgatttattaaccaattatatttttttttccttgcttgacttaactcgcaataattgttgtcaatgaccgaacttgatatgaaggtaatggagtgactatgtttaaagttgaagaagtcagaccataacatggctggactttgtggagtgtccaaaggttcaagatcaacaaatggaaaaccttgagatggacttgatggtgtgagctttggtttagaagacaaattttcttttacattatttttagtttgaatattgaaaatttgataatttaatattaattatgggttggaatatcatgaaatagaagacttgatttttttttaaatgttggacttttactgtttttgtaacaaaagtttaacgaaaggattgattaaataatagttaaaattcaaagtttaatgataccaaattttcatttaagcagttctatagggtaaattaaaataaagtgattcttatttatttttgtaaaaaaaaaaaagctgtaccaaaaagaatgttatttattttagtattgagcacaagaataaatcatatttctttgttattaattttttttatgaatttagtgtccataggaattttaaaaaaagagatagatacagtaaatgcataaatttttcgtattctaagaattaattcgggagaattggataattaagtcgataatttaaaaaagccagcgtaaaaaaagaagtgaattaaaatgttaaaaaaatattttagtattagtcacaataataaaaaaaacgtaaaaaaataatgaaagtgaaaaaaaggcttaaaatataattgtcgtctttttttaatatgttattttagttttttattttttaattgaaatattttatctcttatttttaaaaaatcttgtaattttagtctttttattttttaattgagaaatttttaaaaaatatgtcattttattccatttgatcaaattcttgtttttaattagaatattttgtcctttaaaagttattttgaagaaaccaagaaatacaataaattttattgattttaataaaataattatttcctattctaagaattaagtcggagaattggataataaagtcaataattaaaaaaagaaacgtcaaaaaaaaaaaaaaagaaagacactttcatcagtataaaggaaaccgttctaagaagtgaattaaaatattaaaaaagtattttagtatttggcacaataataaaaaaggtaaaaaataatgaaagtgaagaaaaaaaacaggcagggcagcagtataaataatagaagtttgatgatttatatgcagaaccaacaactacacttgttttctatatattcttgtgtgatcatgaattcctccatttatattcttgtctttgtccagctttggttgttgagcttaccatgcagagagagtgtgtgcatcccaagtgagcgtgagacacttttgaagtttaagaataatctcatagatccttccaataggctttggtcttggaatcataatcataccaactgttgccactggtatggagtcctctgccacaacgtcacttcccatcttcttcagcttcacctccacacctcagattctgctttcgagtatgaatactatcatggattctaccgtagattcgatttggaagcttatcggagatggatctttggtggagagataagtccttgtttggctgatttaaagcatttgaattacttggacttgagcggcaatgaattccttggaaaaggtatggcaattccttctttccttgggacaatgacttccttgactcacctcaacctctcttatactggattctgggggaagattcctcctcagattgggaatctctcaaatttggtgtatcttgccctgagagatgttgacaacggaacagtaccctctcagatcgggaatctctctaagcttcgatatcttgacttgagcgacaattatttccttggagaaggtatggcaattccttctttcctttgtgcaatgacctccttgactcacctcgacctctcttatactcgattcatggggaagattccatctcagattggtaatctctccaatttggtgtatcttggccttggaggttattctgttgtcgaacctctgctagctgaaaatgtagaatgggtatcaagtatgtggaagcttgaatatcttcatttgagtactgtagacctatccaaagcatttcattggctacacactctccaatctcttccttctttgacccacctatatttgtcaggatgcacactccctcactataatgaaccatccttgctcaacttctcatctctgcaaactctcattctttacaatactagttattcccctgccatttcttttgtccccaagtggatattcaaattgaagaaacttgtttctcttcaattatggggtaatgaaatccaaggtccgattcctggcggtattcgaaacctcacacttcttcaaaatctttacttgtctggaaattcattctcatcttcaatacctgattgcttatatgatcttcatcgtctcaagttcctcaacctaggggacaaccacttgcatgggactatttctgatgccctgggaaatttgacttctcttgttgaacttgatttatcaggtaatcaacttgaaggaaacattccaacttctttgggtaatctctgcaacttaagggacattgatttctcaaatctcaaactcaaccaacaggttaatgaacttttagaaattcttgctccttgtatttcccatggactcacaagacttgcagttcagagttcacgactttcaggcaatatgacagatcatattggggcttttaaaaatattgtgcggctagatttttccaacaactcaattggtggtgctcttcctagatcatttggaaaactttcatcaataagatatctcaatctgtctattaataaattcagtggaaatccatttgaaagtcttggatcactctctaaattgtcatctctttatattgatggcaatctttttcatggagttgtcaaggaagatgatcttgcaaatcttacaagcttgacggagtttggtgcatcagggaacaatttcactttaaaagtgggtcccaattggcgtcctaattttcggctttcctatttggatgtgacatcatggcagttaagccccaactttccatcgtggattcagtcacaaaacaaacttcaatatgttggactgtctaacacggggattttagattctattcccacctggttctgggaaacactttctcagattttgtatttaaacctctctcataatcatatccatggtgagattgagactacatttaagaatccaaaatccatccaaactattgatctaagctcaaatcacttgtgtggtaaattaccctatctttcaagtggtgtgtttcagttagatctttcaagcaattcattctctgaatccatgaatgactttttatgtaatgatcaggacgagccagtgcaattaaaatttttgaatcttgcatcaaataatttgtcaggagagatacctgattgctggatgaattggacatctcttgtgtatgtaaatttacaaagcaaccattttgttgggaacttaccccaatccatgggttccttggcagacctgcagtcgttacaaattcgtaacaacacactctcaggaatatttccaaccagtttgaagaagaataaccaattgatatccttggaccttggggaaaataatctttcaggaactattccaacatgggttggagaaaagctcttaaatgtgaaaatcctcctccttcgatcaaacagttttaccggccacattccaaatgaaatatgtcagttgagtcttcttcaggttttagaccttgcacaaaacaatttgtctggcaatataccgagctgtttcagtaacttgagtgccatgacactaaagaaccaaagtacagatcctcgtatctattctcaagcacaatttggtttgctttacacttcctggtatagcatagttagtgtgctactatggctgaaaggaagaggagatgagtacagaaactttctgggtttggtaacaatcattgatctgtcaagtaacaagttattaggggaaataccaagagaaatcacatatctaaatggattgaattttttaaacttgtcccacaaccaattgattggtcatattccacaaggtataggtaatatgagatcattacagtccattgatttttcgaggaatcaactttctggtgaaatccctccaaccattgcaaatttgagctttctgagcatgctagacttgtcttataatcatttgaagggaactattccaacaggaactcaattgcaaacctttgatgcctccagcttcatcggcaacaatctatgtgggccaccactgcccataaactgcagctccaatgggaaaactcatagttatgaaggaagtgatgggcatggagtgaattggttttttgtcagtatgacaattggatttattgtgggattctggatagtgattgctcctttgctgatttgtagatcatggcggtatgcctattttcatttcctggatcatgtgtggttcaaacttcaatcttttcgcttaggtagtatcactgtttagtgttgcttagaatactccgaagttttatcattgtattggcaggttgatcaatttgtagtcattgctatcttcttcttttttttttttttttttcaaatttgagagccttatttaaattctgtttttggatgtaaaaagggagagtagctgaacgtaaagaggggaaggataggaggtgtggggaaatggaactaaggataaccaagtaatttcaaatgctttggtagtctcaatagcatttttgatagtgacaatagtagcccatatatatatatataaatgattatatgtgtgatacaacaaaatccaggatagataaaacaacccataccaactatacaaagtacaagtaaattattatttttacatattttgatgcacaataaatagcaccaacacaacaatgttatatttactaatatattttttaatattaactattttaatacaattaatactgttatttgaacaacatagacattatcttcatttttttttccttcaccgtcttcacccatctccctttgttactaaaaaatgtaacaattacagtaaaagttaatttcttatgaaacatgcttcatttagcttattttaaaaattactgttataacatttttattagatgtaaataaagaagagtaattattttaaaaagaattatataaacatacacttattagtattggatatgactttatactccacataaaacaaattaaataaacgacacctgaatcttttgttcataaattaagggacatgaaaggtgcatagatttttctagtagtgtcacagtcctactattgtacgtatcccactttttctctttttcagaatgatagataccaccacgcatattgtttctggttctatactcctttcaggacagattcctccatgaacagtggtatttgactaaagagtgttgtgtaggtacgtataaaaaaacaattcgacacgcaaatttccaaacagagcactaaaatggcaaatattacatacctggatataactaaatttgggtttatacaactgactaataagattttaaaaaacagtttgccattgcaatttctacttgatcatgatttactaaacattttctttgaggagtctttgtaattgcaacatgacaataattaattatgactgtatcaattatatttgtccatagtattttccaatacaaaaatcacgagaaaactataacaacaactgtggtgggtgaatgcatgcaagtgatgcaacacaaaccttggggtggggtcgatccaattcagatggctatgactaggagggatgatctaggcccaaaatgtttgaactttgaatctacatttgggcatatatatgtgtactctgccaatacaaaacaattattttatatttttatcatttaatattcagtctctcttttacactattaatacatagaccttgagtgagtttatcagatgtgcatcaagcatttttttttctgtggctgtgcaagatctttaacagttgctgatgtgtgtaattataaccaccgccatgattggtatgagcctctgtctaatcttaaagtaaagcttttctgcctttgatgagtgttaaattgactcaatataattgttgtagttataaacaattgtacttcattataaaaagtttttttctgcaatttaagtaacacgtttaatcataaagtaatagtatatacgtactccgaacaatggtggaaacaaaactaacaatgatcgacatggtagttatcgaactaatttaatagtatgaataacacaacaattgattctggggtaaataaaataaagtgaaaaaacttgtgtaaaagacagatacactttgataaaggggatctaaattgttttacaaaacatgaaaccatattcgacttagctggaattatggttagagtaacatgcaagtaactttgttactttgattttgatgttactccacacccgaaaaatgatatagtaatataacaagcataattaattagatttctttattttacacaaagaatcaaattttaattttctttatgatatcaagagtctaatccatttgattcaacagactatacgtgagctgttagaatcaagaatttacaattaattttattcattgaaaaatcattgaaccctaatcaataaggtttaatcgttagtggaagcagagaatggagaatggagacacatgagatgatgcaaggaacaaaagtttatgcaagtgctatcaaccgacatgttagattgatgggcttgtccactgggccactcatgttgggggttgatgtcataatgatatagtgtattaatataaaataaaattgtattagaaaaattaaataaataatgctgtacattcatactgcatggtcaataatttcaatctttttgctcatgtagtatcactttttggtgttgcgtagaataaaccgatgttttatcattgtattggcagattgatcaatttgtagtcattgctatcttcttttttttcttcaaatttgagagccttatttaaattctgtttttagatgtaaagatttgcatatttagtatagttttgtacttaagatcaactagttgtaattctctgattagctagatcacgtagattaaaattcaaatagttggtaagtacttttagttttgaaaccacatgttgggaatctctccaatttagtgtgcactggataatactattctctaatccaaatcacatattcgcttgaattttatttacttgagataatgaatgcattcttgcatgcccactttgaaatcaaccttacctttaataagcattattctttcacatgtacccgttttccaactatgtacaacttaaaaggcaaagagacaatgcttggcttcatcaagaccagtggcaaggaacaggagcacgatagcaaaaaagcataagcatgatcttgtctgctattggtatttaagacctataaaacattgaaaacattacattgtgaacatttcacgtgaatcattgaaaactacaatctattgtatcctgaatgaaagaccatttgcagaattaccctcctcttaaattccaagttgccaaattattgttgaaatttatggtgtgtggactccaactatgtatggccaggtatggaggcttcaaaagtaggacttgatcagttgctcaaatttgtgagacaatgtgttctgccacaagacgacgcaaaatctttccggtggcagtcttgggcaaagaatcagtaatgaagaccttttcagggactttgaaagatgcaagattcttcttgcaatatcttaacacctctgcatcatcaatgtttgatccttctcttgggatgacagcacaatatagctattaaaaggtaaaaataaatatgatcaatatatacaaatttcaaagaactaatagacacatcatttgagcaaattgcaatccacaaatttctgaatttttttcatttattcctctcctagtacaaacaagaaaaaaggtcatatactaatcttttgagaattttgaattaattatgaagattacgaaatattgaacactttaaggaaattttggtaatattgatgaaaaactgtgaagaggttcaaataaaaatcgcctgctctcaaataaaaatcgtcacatggtaatccaaagtagttttttgtcacatggtaatccaaagctagttccatttgccaaaagaggttcaaataaaaatcgtctgctctcaaatagaagagttttcttgtacaccacaaaatgttggtacatgattggagtgtgatctttgagggcagaaagtgataaaagttaaatgccacaaatcctcgattcggtttggattgactttcatgtacatgttactaagaaataaaaaaaaattaataaatgttttatatcaaaatatataagagatatataatacaaaatagtttgtagtaatagtactttaaattgtattttgaaagacttctctatataaacagcattatataaggttcacttccattatatttggaaatgtctatttttttcacctaaaggaaaggaaaacaacatggagggaatgttctgtaaaaacaatttgttcttcatatccttattttgaaacaaatctttgaaaatttgaagtggtggttaaaaatttttcaatttgatttttcctcgcatataccacatttgtgttaagcaaaatttagattcccatatagcatctccaatatgccaagtacctataaacaaatgtagaatgatttagatttatttcttaattattgttaaaatataattgaaaagcataaaattatttgtaaatttaatatcctgaattgaaaaacataaaaacgcacctacacaaccacacctactatttttttttcaaaactatccccacctcaatttagtgatataattttagttgtctttgtgtgtgtgagatgtattgttaatatttatagcatccttcctcataaaatttagggatgtaaaataatttggtttgccttttatgtttgtgtgcgtgatgtaatgttaatgtttacgaccaagctaaaagtaccaaaaaataatttttatctaaaggttttcttgtaataaatataatgggtgaaattagccataatcaaattctactttttctttaatttccttttcatatacagagccatatataacatgaaactgagtttgtccgttttcacactggactaacagcgccaagaatgagaatgaacataattttcagcaattaattaactttgatctgtagactctaggttagtattaaaaacaaaaaataaatctccaaaaggttttgcaataatatctattgtgagtctgtcagagatttagtacactcaagagtgtaaatattttttacactatcaactaatcaatggtttacatttcaacgtgatatgaaaatggtaatatataggtagtatttgagttaagctcatgaaagccaaattagaagccctgcaactgcaaccaaactttctaacaatctcttcccgatataacattcatctgtcccttctaggaacttccttcaactgaatgtaaaaacataagttgttatatgacaactaacaagactgatagatcattcattgcataggaaatggaaacataacactgtagtgtagtgttctttaagaaaaaggaaggcttaattagaaattgaacgtaccagaacactgtgagagattatcaggtgttttgcaaagagaagggagaccaacagcaattgtcatgttaatatttaagccaaggtcaggatcatccctgtctttgagaataaggcagacacacttcttgttggccttcatggcttgtgtgagaccactgcaacaatctgctgtgggtgcttttgcgtcagcacccaaatatggcagacacgttgcaacacctgtcagggattctgcacatctctgtttgtcttgagctgaatctcccattgcatgactaaccaataccaatgttattgctaacactagcaagtgtggtagacaagcatttgaatccatttctcaatcttgatgaatgaatgagtggagatagattatattatagtctatagaaaaagttgtaggtagaaattgttaggttgtggtgctacatgtaaaatattggtttttttgttttaatttattagaaggttctgtagtgtgttatgttttagaaaacatgggaattgggaaggaaactagtagatgaaaataaattctgtggtttcactgtgagttcaatggagaagaccagtttgttgacttagtctggatcatttcaattttgtacaacaccaattgtccactaaagagttatatactatttctcgtggtttttttttttttgtctagagcttagtgttcatggataaacatataattttcttttcttaaaggttgtgagttgtaaaactgcttctggagaagatgacttcgataaagacacaataaaactgcttctggtgaagagggaatttcaagacattggttcttccccaaaagcaacttaactctaatgagaatgtgaaaactgaacaagaggatatatagtctaaaaccaactaacattccaaagttattaaactcatatattaacagcatcaaagttattttcgttttagttttgatacttttgttctaattaagtagtactagcagttgccattctcattattttattatacgtacattctacattctgcttacaacttgcaatgaatggaaaaaagtggagcttggacatcatttgtctgcatgacattcacaccactcacaaaaagtgagtggaaatttttagacaaaatagatgaagaattattaatgttgaaccatcattggaagtggaaagttcattatgagaaagaaaagcagttcgccaaaatggaaagcagtataggtaaagaaagctccagtaattttcaacttctagacattccaggtagagataagaaatgacagttcatagaaaagaaaaggaaaaaaaatgatggcttaaagatctttatctttgagctgtttgtctctactaatcaactatagttagctattttaatttatgattatcaacttgagataccattaagataaaagtggtgtgaaaaaagagcatcaaagtaggcgtgcgtatggcgtcgatcaagagtttcatcacttgttctgtgagggaaacaaaaaacattacaagttcaaaatcaaaaataatagaattccctttataaaacacataatttgtttctcaattctcataagaaaaaaccacttgcactaatgggttggtacaagggtcctggtggcagccatcatgcacaacaatgcaaattccctgacttggtaaaaaaggctaggaaggaattcgtaaaaaccactgaatcaaattcttttgtaacatttggaaatatgagtgagattttcaaaacaccaaacagttatagtatcaaatgttgtatcttcaaatttggtttctttcaacccaaataaagttgcaaaaatggaagaccgagagctaaattagacatagaattcaaatggagcatgtcatcattgacatgaagactgatgagaagtttgaaataacatttcttacatagaattcaaagatttcacacgtagtccattgtttagaataaactgctacatatatataacccgttgttacaaaaaaaataaaaaataaaaagtttaattattcttttggcccttaaagttacgacaatattttttttagtccttataatttaaatcattctattttagtcccagttgaattttttttttactcttttgattctcaccatcaagtttcgactaacgtcaattgttgaaactaatgttgtggagagggcaaagacactctcctatgcacacacgagacgtggctgatcatcttttctctcaacaacaaaccggcacctgcaacatgcatcatcccaactatgaaggcacaaactacctcacctctgttactcatgggaccagaaactcacaatcacacactttatctgcagcaatcaaaaccatcatcccattggaacgatcaacttagttcaatgctgtgataccactccaacttgatgagagactgtcaagaaggagattacatcatggcaattggcaaatgctaagcttgcagaggtcggtggcagactcatgaataatggaatgtgtagtggctttgtctcatacctccattacacttcagttgtacctcagcttgcttccctatttttattaattttgttcatgtttatgtgtgagttgaatcttccccgcgaggaccaaaagataaaaaaaattgtaaatataggaaccaaaatgaatgttttaaactataatgactaaaaaaaaatgatcacaactataaggactaaaaggatagttaaatcaaaataaaataaactagtgcaaaataatggtggtgtggttagacacttttagtcctaaatgtctcgttgtagacatatatacctctacatatgtgtgcatttaccaccattagtggaataaaattttaaatgcaaacccttctatggtatatatcctatataggcattgttagtagtaaataccaaccgtgaaccagaaaattgtggattcaacctttttcgtcttccttcttcttcatggcagtgctatatgcaactcatgttcttctcttgatattgtccactgcaacaactctccagttcagtgcaagcaaggcagcaaggctcaatatgacttgcagcgagaaggaaaggaatgcactcctcagcttcaaacatggactagcagacccttcaaacaggctttcatcgtggtctgacaaatcggattgctgtacatggccaggggttcactgcaacaacacaggtaaagtcatggaaatcaatcttgacacacctgcgggctctccctatagggagttgagtggagagattagtccttctttgcttgaactaaaatatttgaatcgtttggacttgagttcaaattattttgttcttactccaataccaagcttcctaggctcattggagagtctgagatacttggaccttagcttaagtgggttcatgggattaatccctcatcaactaggaaacctctcaaacctgcagcaccttaatcttggatacaattatgctcttcagatagataaccttaattggatatcaaggctatcttccttggagtaccttgatttgagtggttcagaccttcataaacaaggtaactggcttcaagtactgagtgcacttccatctctttcagaactacacttggagagctgtcaaattgataacttaggaccaccaaaaggaaaagccaacttcacacatctccaagtccttgatctttcaattaacaatctcaatcagcaaatcccttcatggctatttaatctcagcacaactcttgtccaacttgatttacacagtaaccttttacagggacaaattccacaaataatatcaagccttcagaacataaaaaatctagacctgcagaacaaccagctcagtgggccacttccagattcattaggccagcttaagcatcttgaagttctaaatctcagtaataatacctttacttgtccaattccctcaccatttgcaaacttgtcatccttgagaactttaaacctggctcacaaccgactgaatggaaccattcctaagagttttgagttcctcagaaacctgcaggtattaaatcttggaactaattctttgactggtgatatgcctgtaactcttggaactctctcaaatttagtaatgttagacctttcatctaatttgttagaaggatctataaaagagtcaaatttcgtaaaacttttgaaattaaaggaactacgtttgtcttggacaaacttgttcctcagtgtcaactcaggatgggttcctccttttcagcttgaatatgttttactgagctcctttggaataggtcctaactttccagaatggctaaaaaggcaaagttctgtgaaggttttgacaatgtctaagacaggtatcgcagacttggttccaagttggttttggaattgaacttcgcaaattgaattcctggatctgtcaaacaatctgttaagtggagacctatctaacatctttctcaattccagcgtcataaatttgagttctaatttgttcaagggtacattgccaagtgtgtctgcaaatgttaaagtgctgaatgttgccaataactcaatttccggaacaatttctccctttttatgtggaaaggaaaatgctactgataagttaagtgtgcttgatttttcaaataatgtcttatatggtgatcttggtcactgttgggtgcattggcaagcattggtgcatttgaacttgggtagtaacaatttgtctggtgttattccaaactccatggggtatctatcttaacttgagtctttgttgttagacgacaaccgcttctctggatatattccttcaacactgcaaaattgctctacaatgaaattcattgacatgggcaataaccaactttctgacgcaataccagattggatgtgggaaatgcaatatctaatggttcttcgtctaagatccaacaatttcaatggcagcattactcaaaagatttgtcaactttcttcccttatagtgctggatcttggcaataacagcctgtcaggatccattccaaattgtttggatgacatgaagacaatggctggtgaagatgacttctttgccaaccctttaagttattcatatagctctgacttcagttataaccactacaaggaaactcttgtcttagttcccaaaggagatgagttagagtacagagacaatctgatattggtgagaatgattgatcttttaagtaataagctgtctggagcaattccatctgaaatttccaagctatctgctttgcggtttttgaacttgtctagaaatcatctgtctggagggataccaaatgacatgggaaaaatgaaattgttagaatcccttgatctctcactaaacaacatttcaggtcaaatccctcaaagcttatctgatttgtccttcctcagtgtcctgaatctatcatacaacaacttatcaggcagaattctcacgagcacccaacttcagagctttgaagaacttagctacactggaaatcctgagctttgtggtcctcctgtaacaaaaaattgcacagacaaggaagagttgacagagagtgcttctgttggacacggtgatggtaatttctttggaacatcagagtttgatatcggtatgggagttggatttgcagcaggattttggggtttttgtagtgttgttttcttcaacagaacttggaggcgtgcttattttcattatcttgaccacttgagagatctgatttatgtgataatagttttgaaggtaagaaggttacttgggaaattgtgagtttacatgttaactgttaggagtgagagacattacaacgtgttattctagacattaaaaatgtgaaaaggtttaccatactatgtacatgttcgtatggggtgtctgtttgttttgctttcattggtaataaatgttcttaatgttaagagaactagacgagcttcagacttgagcatcaaattctgttttgtatttatgacgcattattgtcttctactatctgtgcactaacaatgattagcattaaaatacctggaatgacacactcggtgattggatttaagaagattgttttacgcaacgtgtaacttagaatttgcctgaatgaatttaattagtgtagaaagttggagcttgcataggattctgcagtttctaaacccttccacatcttccttctctcgctattcatgcattttttctataatactcattaacaggacttaggcaataattgggtaataaaaagtataatttctatactatgaatatttgaaattaattaacattagctaatttgatttaaataacaatatgcataaagataaagaaattaaaggaagaaataaaaataagaaaactaaagaagaaaataaaagaaaaaattaaggaaaaaaattgtttgggaattttaacaaacaccccatgtaattgttgggttaaatcaattaaaaaattgttggggtttaatttcattgaagtttctatcacctaataactacacattcatatttaataaaggttatattatcataaacccatcatattatcttcactttaattcctagtgaagagacctaaatcccttgattacactatcaatcccttaaattaatataactaaatgattttcattaagataaagtgtttattgatgctcaattctttttatcttattcctagacataaaaattattaggtgttttttgcagttcgtagttcaaagaattttttaattacaattgaataaaaaaaatcatacaaacaagtgattaagccaaaaacacatattaaacatagaagagaaacaattagaatgctttattcaataaaaaaatagtcattacatgaaaaatgaaccaattatattcaactccaacaaaagagaagattagttcatgacaataaaaaagcataaaagacatatatcacataaatatcctaaaatgacaccaaaatctaagaatacatgataattatctatcatccaaacttaactcaggataaaaaaaaagtagcacattaaaattttatagggatagaaatgatatattttaccctattttttttcatgcttgacttaactctcaacatttgttgtcaatgataagaaactttggcatagatttgatggagtggcctatggttcaagttgaaaaagtggggaccttgatatggatttggtgaagttgtctgtggtttgtctagaagacaatttttttttcttttcttttattttgaatactaaaaatttgatcatttaaaattagttataggttcaaattgcatgtaatagaagactagaatttaataatgcaagaatttttttgttgtttatttggcacaagaataaattatatttctttgtagattatttaagtgatctcatgaattattttttaaagacaatttttttttcttttcttttattttgaatactaaaaatttgatcatttaaaattagttataggttcaaattgcatgtaatagaagactagaatttaataatgcaagaatttttttgttgtttatttggcacaagaataaattatatttctttgtagattatttaagtgatctcatgaattattttttaaaaatattatattgaacgtgagtatttttatgattgcttaaatttggtacttaaaattatttaaaaagtaaaatggaaattaaaattatgttgctcctattagtatttaagttgataacttgtaaagaaaataaaaaatatgatactaatttttatgataaaaaattaagattcattttcaaattaattagaaatagacaattaacacaacaaatattttcaaataatgataatatataaactgaaaagcttatgcattaagaatgcaaatcttcataagttagatatttcaataaattatatatttatttttctcttctatcactattcttaaaatatcaccacacaagtaaatgaaattcagacaaagactttaatatatgaagacttgtggtctaacaataaaatagctaaggccatagataaataatttaaaaaaacatgccacacttcttggtatatcatatcctctaatttactttttaagctaaatatgatctacaatatatggagaaatttggaccaagacttataaaagaaaaaagttatgatctcaataattatggtagaccaagttaaacaagcattttacacttctttgtatcttactaattaatttttaaagaaaaagaatataatattcaggctaaaatacaattagaaatagacgacacaacaatctttccgattaatgacaatgaaaattagttttttttcacatataagaagaatattattttgtaaattaaaaaatagatcaaaattaaatagttagattgaaacgaaagagtctttttttatatagattttttaaccgaaatagtctttaaattagatcatttacctataattgatgtattcatcatttataatttttttccttgcttacttaattctaaacatttgttgtcaatgataaggaacttgatatgaaggtaatgtagtgacctatggttcatgttgaagaagatacagacctaaatatggttggctgtggagtgtcctaaggttcaagatgaaaaaatgaaggacattgacttggacttgatggagtagtctatggttcaagtggaaaaagtggggtccttgatattaatttggtggagtgggaagtggtttgtctaggagactagacaattttgttttcatttcttttatttggaataataaaaaattgatattttaaaattaattatgggttcaaactgcaagtaatagaatatttgaattttataaggcaagacattttgtgatatgaaagtggtaatatataggtagtatttgagtaatgctcatgaaagccaaattagaagccctgcaactgcaaccaaactttctaacaatctcttcccgatataagatgcactattcttagctgtggccgtttcatctgtcccttgctttctaccattctgggaacttccttcaactgaatgcacaaaagaacaccaattgtccactaaagagttatatattatttctcgtggttatttatttatttatttatttttgtctagagcttagtgttcatgtggagagcttgagacgggtggaagactaagtttcaaatgaaactttttttagtaattgttttacaaatcattaggtgatttctaattaattaacaatttaaatttttacactgtgtatcaaaattaaactcatgtattaacagcatcaaagttattttcgttctaattttgatacttttgttttaattaagtactacgtactagtagttggcattctcattattttattatacgtacattctacattctgcttacaacttgcaatgaatggaaaaagtggagcttgaacatcatttgtctgcatgacattcacaccactcacaaaaagtgattggaaatttttagacaaaatagataaagaattattaatgttgaaccatcattggaatagtggaaagttcattatgagaaagaaaagcagttggccaaaatggaaagcagtatagttaaagaaagctcaagttttcaacttctagacattccatgtagagataagaaatgacagttcatagaaaagaaaaggaaaaaaaatgatggcttaaagatctttatctttgagctgtttgtgagagtgttactgcttgcacctccttgcttgctatgctatcatttacttaacaaaggtgtaacgaaaggattgatttaaataatagttaaaatttgaagactaattaaaccaaatttaattaccttggatttaaagtattaaaaaaatgattaatattttcttaaaatgaaatttcattgatttaagcaattttatattgtgatctaaaatatattttttttcttattttagtattcgatctgcataagaataaatcatatttcttagtagattatttaagttatcatatgaatattttttttaagaatattatattgaacatgagaaattttatgattgcttaaatttggcaattaaaattatttaaaaattaaaatggaaattaaaattatgtttctcctattatttaagttgatgacgtgtaaaaaaatacaaaatatgctactaattttttttagaaaaaaattaatattctttttcacacttctttttatatcaccaattaatttttatatgataaagaaaataatattcatgtttgaatacaattagaaatagatcacacaacaaccattccaaataacgattaaatctagtctttttttcatatataagagaatattattttgtgaattaaaaaattgatcaaaattaaatagcaagatatgaatgaaataattttttttatatagattttttaactgaaatagtctttaaattagacccttttcctataattgatgtatttataattaatatattgtttgtgccctatgggctatggttcaagttgaagccagagaccataacatggctggactttgtggagtgtccaaaggttcaagataaaaaaatacaggaccttgagatagacttgatggagtcggctatggtttaattaacaaaataatatttaaattaacaaaagttgaacttttaataaaaggcttgaattaaataatagttaaattcaataccaaattttgtaataattaacaaaagttgaattaacaaaattttgtaaaagacttgaattaacaaaagttggacttttaataaaagacttgatggagtccatgaaatagaagacttgaatttttttaataaaatgttgaacttttattgtttaattaacaaaagtttaacgaaaggatagattaaataatagttaaattcaatataaaattttgtgtatataggaatttttaaaagggagatagataaagtaaattcaaaattatttcctattctaagaattaactcgggagaattggataataaagtcaataattaaaaaaaggaaacgtcataaaaaaaaaagaaaaaagaaaagaaagacacttgcagcagtataaataatagaagttttatgatttatatgcagaagcaagaagcacttatacaattaagttgttttatatatatgcgttgcagaagttgaagaagtcagagaccttaatatgggtggactttgtggagtgtcctaaggttgaagtagtctatggttcaagttggaaaagtggggaccttaaaatggaggaccttgacatagacttgatggagtagtctatggttcaagttggaaaagtggggaccttgatatgaatttggtggagtggccagccggtttctctgggagacaattttgttttcatttcttttattttgaataattaaaatttgatagtttaaaattaattatgggttcaaaccgcatgtaatagaatgtttgaattttataagacaagactttttgttgtttacttaacgcgtacaggtttaacgaaaggattgatttgaataatagttaaaatttgaagactaattaagccaaatttaattatctttgatgtaaactacttaaagttttaaaaaaatcattaatattttcttaaaataaaaatttcattcatttaagcaattctatacggtaaactaaaataaaaaatgtttcttgttttagtatttggcacaagaataaattatatttctttatagattgtttaagttatcatatggatttttttttgaaaatattatattgaacgtgagtattctcatgattatttaaatttggcacttgcaattatttaaaaagtaaaatggaaattaaaattatgtttctcctcttatttaagttgataacttgtaaaaaatatataatatgatactgatttttttttgagaaaaaaagttaatattctttttacttcttttatataactaattaatttttatatgataaataaaataatattcaagttagaatacaattataaatacatgacacaattacttttccaattgatgataattaaatctagtctttttttcctatataagagaatattattttgtgaactgaaaaattgattaaaattaaataattagattggaaggaaataattttttttatagattttttaatagaaatagtctttaaagtacacccttttcctataattgatgtattcatcaattaattgagttagatatttcaataaattgaatatttatttttctcttctatcactattcttaaactatcaccataaatgaaatttagacaaaaactttaatatatgaaaacttgtattctaacaataaatagctaggaccataattttataatttaaaaaatatgtcacacttctttgtagatcttctaatttactttttaagttaaatatgatctacaatacatggagaaatttggaccaagacttatagaaggaaaaactatgatctcaataattatgatagatcaagttaaacttctttgtatctcactaattaatttttaataaaaagaaaataatattatgattaaaaaaacaattagaaatagacaacacaacaatcattaatgacaatgaagattaattaatctttttcacatataagaagaatattattttgtgaattgaaaaattgatcaaaattaaatagctagcttggaatgaaataattttttttatagatttttttaaccaaaatagtctttaaagtaaactcttttcctataattgatttattcatcaataatattttttttccttgcttgacttaactcgcaatatttgttgtcaatgacagggaacttgatatgaaggtaatgcagtgacctatggttcaagttgaagaagtcagaccttaacatcatggctggactttgtggagtgtccaaaggttcaagatgaaaaaatggaaaatcttgagattgacttgatggtgtaagctatgatttagaagacaattttcttttacattatttttagtttgaatattgaaaatttgataatttaatattaaatttgaagaaataaaagacttgatttttttcttaaaaaaatgttattaattttgataatttaatattaaatttgttattaattttgatttttcatgaatttagtgtatataggaattttaaaaagggagatagatacagtaaatacaaaaaatttcgtattctaagaattaattcgggagaattggataattaaatcgataatttaaagaggccagtgtaaaaaaaagaatggaagaatattttagtatttggcacaataataaaaaaggtaaaaaataatgaaagtggagaaaaaaacaggcagggcagcagtataaataatagaagtttgatgatttatatgcagaaccaacaactacacttgttttctatatattcttgtgtgatcatgaattcctcctccattatttatattcttgtctttgtccagctttggttgttgagcttaccatgcagagagagtgtgtgcatcccaagtgagcgtgagacacttttgaagattaagaataatctcatagatccttcaaataggctttggtcttggaatcataataataccaactgttgccactggtatggagtcctctgccacaacgtcacttcccatcttcttcagcttcacctcaacactacagttcctgctttcgagtatgatgatggctacgagtatgactactatgatgaagtcttccgtggattgaatgaggaagcttataggagaaggagctttggtggagagataagtccttgtttggctgatttaaagcatttgaattacttggacttgagcggcaatgaattccttggagaaggtatgtcaattccttctttccttgggacaatgacttccttgactcatctcaacctctctcatactggattcagggggaagattcctcctcagattgggaatctctcaaatttggtgtatcttgacctgagttatgttgttgccaacggaacagtaccctctcagatcgggaatctctctaagcttcgatatcttgacttgagcgacaatgattttgaaggtatggcaattccttctttcctttgtgcaatgacctccttgactcacctcgacctctcttattctcgattcatggggaagattccatctcagattgggaatctctccaatttgctctatcttggccttggaggtaattatcatgctgaaaatgtagaatgggtatcaagtatgtggaagcttgaatatcttgatttgagtagtgcaaacctatccaaagcatttcattggctacacactctccaatctcttccttctttgacccacctatatttgtcaggatgcaaactccctcactataatgaaccatccttgctcaacttctcatctttgcaaactcttgatctttccgatactagttattcccctgccatttcttttgtccccaagtggatattcaaattgaagaaacttgtttctcttcaattatcagataattatgaaatccaaggtccgattccttgtggtattcgaaacctcacacatcttcaaaatcttgacttgtctttcaattcattttcatcttctatacctaattgcttatacggtcttcatcgtctcaagttcctcaacctaaggtacaacaacttgcatgggactatttctgatgccctgggaaatttgacttctcttgttgaacttgatttatcagttaatcaacttgaaggaaccattccaacttcttttggaaatttgacttctcttgttgaacttgatttatcacttaatcaacttgaaggaaccattccaatttctttgggaaatttgacttctcttgttgaacttgatttatcagctaatcaacttgaaggaaacattccaacttctttgggtaatctctgcaacttaagggtgatagatttatcatatctcaaactcaaccaacaggttaatgaacttttagaaattcttgctccttgtatttcccatggactcacaagacttgcagttcagagttcacgactttcaggcaatctgacagatcatattggggcatttaaaaatattgagcagctacggttttacaacaactcaattggtggtgctcttcctagatcatttggaaaactttcatcattaagatatctcgatctctctatcaataaattcagtggaaatccatttgaaagtcttcgatcactctctaaattgttatctcttcatattgacggcaatctttttcacggagttgtcaaggaagatgatcttgcaaatcttacaagcttgacggggtttgtcgcatcggggaacaatttcactttaaaagtgggtcccaattggattcctaattttcaacttacctatttggaagtgacatcatggcaattaggtcccagctttccattgtggattcagtcacaaaacaaacttaaatatgttggactatctaacacggggattttcgattctattcccacacagatgtgggaagcactttctcaggttttgtatttaaacctctctcgtaatcacatccatggtgagattgggactacattaaagaatccaatatctatccgaactattgatctaagctcaaatcacttgtgtggtaaattaccctatctttcaagtgatgtgcatcagttagatctttcaagcaattcattctctgaatccatgaatgactttttatgtaacgatcaggacaagccaatactattagaatttctgaatcttgcatcaaataatttgtcaggagagatacctgattgctggatgaattggacatttcttgcggatgtaaatttacaaagcaaccattttgttgggaacttaccccaatccatgggttccttggcagacctgcagtctttacaaattcgtaacaacacactctcaggaatatttccaaccagtttgaagaagaataaccaattgatatccttggaccttggggaaaataatctttcaggaactattccaacatgggttggagaaaacctcttaaatgtgaaaatcctccgccttcgatcaaacagatttggcggccacattccaaatgaaatatgtcagatgagtcttcttcaggttttagaccttgcacaaaacaatctgtctggcaatataccgagctgtttcagtaacttgagtgccatgacactaaagaaccaaagtacagatcctcgtatctattctcaaggaaaatatattgtgtcttactctgccacggaaagtatagttagtgtgctactatggctgaaaggaagaggagatgagtacagaaacattctgggtttggtaacaagcattgatctgtcaagtaacaagttatttggggaaataccaagagaaatcacatatctaaatggattgaattttttaaacatgtcccacaaccaattgattggtcatattccacaaggtataggtaatatgagatcattacagtccattgatttttcgaggaatcaactttttggtgaaatccctccaagcattgcaaatttgagctttctgagcatgctagacttgtcttacaatcatttgaagggaaatattccaacaggaactcaattgcaaacctttgatgcctccagctttatcggcaacaatctatgtggtccaccactgcccataaactgcagctccaatgggaaaacccatagttatgaaggaagtgatgggcatggagtgaattggttttttgtcagtatgacagttggatttattgtgggattctggatagtgattgctcctttgctgatttgtagatcatggcggtatgcctattttcatttccttgatcatgtgtggttcaaacttcaatcttttttctcatgtagtatcactgtttagtgttgcttagaatactccgatgttttatcattgtattggcaggttgatcaatttgtagtcattgctatcttctttttttcaaatttaagagccttatttaaattctgtttttggatgtaaagagggagagtagctgaacgtaacgaggggaaggataggaggtgtggggaaatggaactaaggataaccaagtaatttcaaatgctttggtagtctcaatagcatttttgatagtgacaatagtagcccatatatatataaatgattatatgtgtgataaaacaaaatccaggatagataaaacaacccataccaactatacaaattacaagttaattattatttttacatattttgatgcacaataaatagcgccaacacaacaatgttatatttactaatatattttttaatattaactattttaatacaattaatactgttatttgaacaacatagacattatcttcatttttttttccttcaccgtcttcacccatctccctttgttactaaaaaatgtaacaattacagtaaaagttaatttcttatgaaacatgcttcatttagcttattttaaaaattaatgtgataacatttttaatagatgaaaataaagaagagtaattattttaaaaagaattatataaacatacacttattagtattggatatgatgactttacactccatataaaacaaattcaataaataatacctgaatcttttgttcataaatttagggacacgaaaggtgcatagatttttctagtagtgtcacagtcctactattgtacgtgtcccactttttctctttttcagaatgatagatacaaccacgcatattgtttctggttctatactcctttcaggacagattcctccatgaacagtggtatttggctaaagagtgttgtgtaggtacgtataaaaaaaacaattcgacacgcaaatttccaaacagagcactaaaatggcaaatattacatacctggatataactaaatttgggtttatacaactgactaataagattttaaaaaacagtttgccattgcaatttctacttgatcatgatttactaaacattttctttgaggagtctttgtaattgcaacatgacaataattaattatgactgtatcaattatatttgtccatagtattttccaatacaaaaatcacgagaaaactataacaacaactgtggtgggtgaatgcatgcaagtgatgcaacacaaaccttggggtggggtcgatccaattcagatgtctatgactaggagggatggtctagctataggcccaaaatgtttgaactttgaatcaacatttgggcatatatatgtgtactctgccaatacaaaacaattattttatatttttatcatttaatattcagtctctcttttacactattaatacatagaccttgagtgagtttatcagatgtgcatcaagcatttttttttctgtggctgtgcaagatcttttacagttgctgatgtgtgtaattataaccaccgccatgattggtatgagcctctgtctaatcttaaagtaaagcttttctgcctttgatgagtgttaaattgactcaatataattgttgtagttataaacaattgtacttcattataaagagtttttatctgcaatttaagtaacacgtttaatcataaagtaatagtatatacgtactccgaacaatggtggaaacaaaactaacaatgatcgacatggtagttatcggactaatttaatagtatgaataacacaacaattgattcagggggaaataaaataaagtgaaaaaacttgtgtaaaagacagatacactttgataaaggggatctaaattgttttacaaaacatgaaaccatattcgacttagctggaattatggttagagtaacatgcaagtaactttgttactttgattttgatgttactccacacaggaaaaatgatatatatagtaacataacaagcataattaattagtttgctttattttacacaaagaatcaaattttaattttctttatgatatcaagagtctaatccatttgattcaacagactatacgtgagctgttagaatcaagaatttaaaattaattttattcattgaaaaatcattgaaccctaatcaataaggtttaatcgttagtggaagcagagaatggagaatggagacacatgagatgatgcaaggaacaaaagtttatgcaagtgctatcaaccgacatgttagatgatgcaaggaacaaaagtttacgtcaaaatactaaaattatatatagcgccgttatttaacaacgatttgacaatcgacgattcctaaggatatattgaaacctgcggcaaacaactgaggcaaaccacgtgaaattaaggaatataattctcgaagaattaaggaatttttgctatgtagcagtagtaattaactagtttttttatgtataaaagtagtaattaactagtagttaagaagttgttttgtgagagtttttgtattaatataaaataaaattgtattagaaaaattaaataaataatgctgtacattcatactgcatggtcaataatttctatctttttgttcatgtagtatcactttttagtgttgcttagaataaaccgatgttttatcattgtattggcagattgatcaatttgtagtcattgctatcttcttttttttcttcaaatttgagagccttatttaaattctgtttttagatgtaaagatttgcatatttagtatagttttgttcttaagatcaactagttgtaattctctgattagctagatcacgtagattaaaattcaaatagttggtaagtacttttagttttgaaaccacatgttgggaatctctgcaatttagtgtgcactggataatactattctctaatccaaatcacatattcgcttgaatttatttacttgagataatgaatgcattcttgcatgcccactttaaaatcaaccttacctttaataagcattattctttcacatgtacccgttttgcaactatgtacaacttaaaaggcaaagagacaatgcttggcttcatcaagaccagtggcaaggaacaggagcacgatagcaaaaaagcataagcatgatcttgtctgctattggtatttaagacctataaaacattgaaaacattacatcgtgaacatttcacgtgaatcattgaaaactacaatctattgtatcctgaatgaaagaccatttgcagaattaccctcctcttaaatgccaagttgccaaattattgttgaaatttatggtgtgtggactccaactatgtatggccaggtatggaggcttcaaaagtaggacttgatcagttgctcaaatttgagagacaatgtgttctgccacaagacaacgcaaaatctttccggtggcagtcttgtgcaaagaatcagtaatgaagaccttttcagggactttgaaagatgcaagattcttcttgcaatatcttagcacctctgcatcatcaatgtttgatccttctcttgggatgacagcacaatatatctattaaaaggtaaaaataaatatgatcaatatatacaaatttcaaagaactaatagacacatcatttgagcaaattgcaatccacaaatttctgaatttttttcatttattcctctcctagtacaaacaagaaaaaaggtcatatactaatcttttgagaattttgaattaattatgaagattacgaaatattgaacaccttaaggaaattttggtaatattgatgaaaaacagtgaaggctataacaatttatttcacaagcatctagggtcactgataactctggaattcgaggtctagaatcctccttacagaattaagaagagaagataagaagggtaaggaaatgcttgaatattctcattgcctcgtaattattattacatggtattatatagatggtttcctaacagaatagtgctgagctggctaagtaggaatcattctagaatatagaataacagaattggttatgtatttctcttaacaatttcctattaagtatgaggctgagtgtgtgaggctattatgtaattctttctaaacgtagtcctttaagtagctgggtttagtaatccttcttttgggcctttcttctccctgcaccccctcattcttcttttgagctgaactctgatcttcttcttcctcggtaccttcttcttcataccctgtacctgtatcatccctcggcccatgtagagtcaccttgtcctcaaggtgatagtcctggcaaagctggtcccaatcttcccacgacgtctcctccggtgggagaccctgccactgcaccaaaacctgccaaggactatgaggatcagaggttgcacgacgagaccccagaatggcaagaggggatatgagtggttgattctcgtgaaaattgggtggcaaaggaattgaggaattggagtctgtctcgccccgaaaaggtttgaggttcgagcaatgaaacaccaggtggatgcaaacgcctgccggaaaatccacgcgataagctacgggcccgagcttagctgtgacctgaaatgggccataataacaacgagctaacttcacattggttgagtgatcccctttggcagaggactgcctgtaaggacgaagacgaaccagaacccagtccccaggaacaaattggacatccctacgatgcttgtccgcgtaaagcttcatcttgttctgagccttcaagagcttcttatgaatttattggaatgtcttgtctctttcagttaagaggtcatctacagcatcgaccttcgaagaacccacgagatactctggaaaattgaatggccggcgaccaaaggtgatttcataaggggtagtgcccgtgtttgacatccatgaggtattatgggaccactctacccatggaagtagtcttccccaactcgtaggacgtctgtggacaaacgcgcgcaggtattgctccacgaccctgttcaagacttcggtttggccatcactttgggggtgataggctgaactcatgcggagctgagttccactagccttgaatagttcctgccatagttgactgacgaagaggggatcccgatccgagactaggcttctgggcattccatggattttcaccactatttccaagaacaatttcgccaccgtgagggctgagtggctcggaggcagcattcctaaatgaatacctttagaaaagcgatccactgtaacaaggatcacagtgttgccacggtatgcaggtaagcccgtaatgaagtctaaagataggtcacaccagggttgactgggcactgggagagggcagagaagtcctgcgagcttcttggtctcgtacttcgtgacttggcagtcaacacagcgagcaatgaagcgagagacgtcatcgcgaagaccaggccaataaaaatttgtcatgagccgagctacagtctttgcgacgccggcgtggccaccggtaggggtggcatggtattctgtcagcagggtggtgatgatgggtattcccggaggcaaccatatacggcccttatacaacagcaacttgtcggcaatggagaactcagggttgttctcgggatgagtctgaacatcaagcatcttttgctgaaatgtcgaattcgtgcgcaattgagcatggagctcgtctaaaaaagtgagacaagggacggagaggatgagaaaggcctgaggagcacctttcggtaatcgggataaggcatctgccgcctgattatgagtccctgagcgatattggatatgataatcatatcccattaagcgcgctaaataggtatgttgttctggagtttgaacaacctgggtcatgagttctttcaggcttcggtgatctgttaagatggtaaagctatgcccgagaaggtattgccgccacttcttaacggcggtggtaatggcgaacagttctcagacataggtggaggcccggagcattttctgattgaagggtttgctaaagaatgcaattgggtggccctgttgtgacaaaacagcccccatgccaattgcggatgcatcagtctcaactgtgaagggtaaccagaagtcagggagggcgagaaccggtgcggacgtcaaagctgtcttcaaggtctcaaaggcggtctgcgcggcggaggtccagtgaagtggttcaacggtggtagccttaaccagtggggtagcgatggtggcgtacccgcgaatgaaccgatgataaaatccggcgaggcccaagaaactgcggagagctcgaactgaacgtggagtgggccactgtgtaatggcgttaagcttcgaagcaacaggttgaacgccgcggtgagagactaggtgacccaaatattccacctgaggttgggcgaaaagacacttggagagcttcaaaacgaaatgattctcatatagcacctggaaggtagtttgaaggtgacgcaggtgatcgctgatggagacactgtagatgaggatatcgtcaaagaagacgatgataaagcgtcgaaggtatggccggaagagagtgttcattgtcgcctgaaacgaagagggcgcgttacacaggacgaaaggcataactttgaactcaaagtgcccatggtgggttctgaaagctgtcttgggaatgtcctccagttgcatgcgtatctggtgatacccttgcagcaagtccagtttggagaagtaactcgcacctccgagctcatccaagagctcatcaatggtgggaatggggaaacgatccttgatcgttaatgcattcaatgctctgtagtccacgcagaacctccaggtgttgtcggacttcttcaccaacagcaccggtgaagagaaaggactcttgctgggctgaatgatgcctcgttggagcattgcctcaacctgggtttctatttcgcgcttttggtaataaggatacttgtatgggagaacattgactggggtggcatctggacgcaagtggatctgatgatcagtctctctttccggcgacagcgttgtcgggtcctgaaaaagaatggaaaattgatgaagaagttgctggacctgtgggtcaacgggaacggtcaacgggggctctgaatcctcaggaagcaccgtaatgtggaagcaaatgctattgggttgatctcggcagacacggcggaattgaggggaggagagtaattcgtgttgagtagcagaatcaccttggagctcgactaacctgttatcatggaaaaattgcatactgagcttagtataatcagttagaacagggcctagggattgtaaccattgcacgcccagaataacgttagcgccagcgattgggaggacataaagattgacggtgaacgaatgatgttgaatgtcgattgtggtggagtcacaagtggtatggcactgcaaatgttggtcgttgccaacgaggaccttcaatggagtggtgggcctctggggtagccccaattgggccacaagctgttcctgaatgaaattgtgggtactcccactattaatcaagaccaggacagggatgccggaaatgtgaccgacgagcctcagggtctcaggggaaaggtggcctgcaagggagttgcggctaatgtgggctggggtctcgggtatctcaattgggccgggagtcgggtctattggagcgggtggatctatattagaacccacatgctcgagagggtcatcctcatctgctatcaacaggtgaaccctaggggcgcaccgatgccccttatggaacttctcgtcgcaagagaagcagaggccgcgctcgcggcgggaggctagctcctccggggtcagacggcggaccgtgggtggcggtgacggtgatggacgcggaggcaaaggcaagagtggaggaaggggcgaggcgcggggagaggcaaaggtcgtgagaggtggaggctgcggtggagctactggcaactgggactatgcccgaggtcgtgggttttggcggaaatcaaaacggaagtcgcatagcttctcctcatggagacgggctagcccggccgcctgagcgacgatgaggggttgattcaccatcacctcgcggcgaatctccggcgcgagtccagatacgaaacagctaagcaggaatggagctgggagtccgaccaccctgttggccaattcctcaaattcagataagtactccgtgactgttgtcctctgtgtaagcttgaacaaggaccctgaggggtcctcatattgggatggggcaaaacgattttgcagagcctgcagaaagacgggccagaaggtgaattgtccgttgcttgacatccattgaaaccaagcaagggctcttccctccatataaaatgctgctatagtgatgcgattgtgatccggggtaccgtggtactcgaagaactgggtgattttaaaaatccacccaagaggatcagtaccatcaaatctgggtacatctaacttcattcggtgtgaatgtgcaggtatcggactacgaggtggaaaggaaggagaagcagagggtgtaacatgttgcagaaggtcctcaatgcgtgaagtaagccgggctaaggcagcctcgatacgatcgttgctgggctcggccatggaagcggaaggagcaatgaaagcaccagtgataactctggaattcgaggtccagaatcctccttacagaattaagaagagaagataagaagggtaaggaaatgcttgaatattctcattgcctcgtaattattattacatggtattatatagatggtttcctaacagaatagtgctgagctggctaagtaggaatcattctagaatatagaataacagaattggttatgtatttctcttaacaatttcctattaagtatgaggctgagtgtgtgaggctgttatgtaattctttctaaacgtagtcctttaagtagctgggtttagtaatccttcttttgggcctttcttctccctgcaccccctcattcttcttttgagctgaactctgatcttcttcttcctcggtaccttcttcttcataccctgtacctgtatcagtcactaagtgcgtgagaaagcaagcaattcaagctgttgctaggtaacaagttgcaattgttttttgttggggagaatgacatcaaaaggttatgaagttgctgaccgtttcagaagttaattagtcatgcgtagccaatattacacgaaacgcttttcagatttggttaatacaaagttaggaaagtagttttttgtcacatgggaatccaaagctagttccatttgccaaaagaggttcaaataaaaatcgtctgttctcaaatagaagagttttcttgtataccacaaaatgttggtacatgattagagtgtgatctttgagggcagaaagtgataaaagttaaatgccacataaatcctcggtttggtttgactttcatgtacatgttactaagaaataaataataaatgttttatatcaaaatatataagagatatataatacaaaatagtttgtagtaatagtactttaaattgtattttgaaagacttctctatataaacagcattatataaggttcacttccattatttttggaaatgtctatttttttcacctaaaggaggaaaacatcatggagggaatgttctgtaaaaacaatttgttcttcatatccttattttgaaacaaatcttttaaaatttgaagtggtggtaaaaaaaatttcaatttgatttttccttgcatataccacatttgtgttaagcaaaatttagattcccatatagcatctccaatatgccaagtacctataaacaaatgtagaatgatttagatttatttcttaattattgttaaaatataattgaaaagcataaaattatttgtaaatttaatatcctgaattgaaaaacataaaaacacacctacacaaccacacctactatttttttttcaaaactatccccacctcaatttagtgaaaaattataaagattttgtgcatttaaatataggttccatttttttaatggacactttagggtgtcaagacctttcctaatccactccccaacctattttttgttcaaagaccattattttttgagtatttttcaatgtttacgtgtgtattctggtcacgtaaactttttcttcctattctttaggcttgtcaaatagatagattaaataattttttttatttagattacagtggatggattattaaaagcaatccgttaatcatttatgatctattaaaaagtcggatagtaattattttgtttatcttttaattagaataccattctgttaaacaatcagttaatcaatttagcatctatagagaatactatatatttctgtcaacagttaataagaaaaaatgatgcaggtttatcttttatcctttccataagattaatttatcttttagaataatctatcgtttagtttatttatttttagattaatttatcttttagtttactttttattcgtgaatacacatattcaaataaataaataataaactattcaacctattctttaaaaagatattataaaagataaaaaataaactaagagattaatcatcgattatatatccgttgaatgaaattcatccaattcatcttatttataagcctttccctttacttggtcatcctcataactcacaagccacgatggtattcatctttcccttcctttaattatgcgattcgttacaatgcaaagtatttctagcttttcattttctgatactgctatatattgaaaacgggatattggaaacgatttttgttttggtttttcacccatgatattacattattaatgctgtgcatgattcatattttaaggacaacacaaaatgatagaataaacataaaagtcatttcttgttgggttacaaatgggttggggttgtatatgtgtgtttctctcatatccttcagaattcttgtagttattcctaacaacaattaaattttattcttctttttagacaactatctctacttttttggaacaaaaaattgcatgcaaagttattgatatcagtattatctaaaataaaaaaattgaagcatttgtacgtctaacgtttttgtggacaggcaccaggaaaaggaaaagaaacatagggggaattggtggtgaggagacagaggcaaattataagaaatgcaaaagatgatagggacaagatcagtgagttacctattcacgttttcctcagaataatattggaatttatgaacacaaaagatgttgttcggctttgtgctttgtctaaaagttggaaggatttttggaaacgtttaactactctctcagttttgattcttgggagtcaagtattttcaattgccacaagtttgtgttcgaggttttgtctggtcgagatggttgattccattcctctacttaatcttgagatcattctccgcaccgacctcgaacaactagatgatatatatcctgaaatatggcgtgtctcacaacatccagcaattgaaaatctttctttttgtgaaccatagattccatttggtgtttccctcttctattttttctgtccaactatgacatctcttcgcttttccccttcctgaaaatatgctgtgttaaagtcctttggattaataattctaacccggatcttgcttaccctattgatggttacaaaattgtgttttcaactccgagtcttggttttctcactatcaacaatgttcatcatggtcaccaacttccctccacgtgtaatctttcatctcttgaagtagatattaatgtcagtgtttcgccatgttctccattctttaaaagtttgttgcaagtgcttgctaatgttaacaaattgacactttcttggaggaccctaggatgatgctatttttaatttttactttgtatgttttgtctttttcggtatgtgtttgaaagtattttttttctctacgattttaaacttattatctattctaataaagtgctgaaagttatattcctatttcttgcttaaataatttagtaaatatttcttttatttccctttctttctgatgctctcttgaaagaaactataggatgttatatatattgtggggagtgaaaaacacaaacttttcttatatattcttttgaacgtttacttaaaattcttaaggtgaagattttttttaaattgtttagttttttatttcattttattattaacttattccttttttttttcggtccaagattaacgtattcccttatgctctcttacattagattatagattgttacactgtgagtgctctgtttgctctgtttgttatatatgttgtttttaattgacttttacgtaagattaaagtttttaattataagaaactattagagtgaagcaggggaacaaaaatcttgcattgatattaagaaatacattctttggtgatgcagaaacaatgttgtgccatttgcagagcattatttgagaaaatagtatcaaataacgacataatcaattggtgtcgtttgtgtgtgtaaaatagaaaagcaagtagcatagcaagagcaggagtttgaataagaaataaatgttgagcatgttaaatcaacaaaacaaaattgaaaataatgatttaagaatatggctgaaaacaaggatgtgatccaacactaaggtagaaaataaaagcatatcagtcaaatggcaagccaggacagaaaaatatttatttagtactttgcatagactaatagtgattaggaagggaaggtggaatctgggtttgtggagtaggtctaaattcctaataatttgcatataatatttccgttatgtatttttaatatttgttaacatgtttgtaatcttttgtttattgcaatcaattacttatctcattttatgcacatgtaagtagtaaatttataaaatatttttgtcaattttataagttagttgtttttgaaggaaaatgaacattggggaagttgaagtttccttgctgagctgtagtcttaacaaattcctaacaacaaacctacaggaatatgtcctaccagttagacgtagaataaccaattgatatccttggaccttgggaaaaataatctttgagtaactattccaacataatgcagtgacatgtggttcaagttgaagaagtcagcccttaatatggctggactttgtggattgtccaaaggttcaaggtgaaaaaacggaacaccttgagatggacttgatggagtgggctatgggttgggatatcatgaactagtacacttgattttttttttaaaaatgttgaacttttattgtttacataacaaaaatttaatgaaaggattgattataatagttaaaatttgaattttaatgacaccaaattttcattttaagcagttctattgaagaaaggcacttgcggcagtataaataataaaaagaagtaagtttaatatgcagaagcaagaagcacttatacaattaacttgtttcatatatgtgttgcatgatcatgaattcctccattatttatgcgttgcatgcttgaatctctcttgaaatgagatctcaaatattcacttgttgttgggtaatgaaatccaaggtccgattccctggtggtattcgaaacctcactttttcaaaatcttaacttgtccaaaagttcattctaatattctatacctgattggttatacggtcttcgtcatctcaagtatctggacataaggtacagcaacttgcataggactatttcttatgttctaggaaaattttctcttgttgaacttgatttatcaatcaatcaacctgaagcaaccattcgaacttctttgggtaatctatgtaacttaagggagattgatttctcatatctcaaactcaacaaacagattaatgatattttagaaattctagctccttgtacttcccatggactcacaacactttcaggaaatttgacggtttgttaccgttcaggggcaaatcttttccatttttttaccatatggaagtattttcttaaattattttttaaaagaggataagttgtattagttgttactgagttagaagtcgtgatatcgattatgatttattatttttttcttttttaacggaaatcataaaattatttatgactttaatgtcattttttatctacaactttaaagttattatttttttaaaaattttatgaattcaaagttgtaagtgtgacaccctttaccccgacatatatataaataaataaaatatataaaaatatcggtaaccaaattcacacaggtaaaaggttcacattcacttcactatcatcaattaaaacttattaaaacatattcggctcaaaataaggccgtcaaaatttacaaaaatatttttgttaaatcagtgagataaaataaagtagactaacatcatgcaattaatataaaacttatgtcccacagtcacatcctatcagagcattgtgtcccgacgtccttcagcacaaggtttcttaaatcacttcacctagccatctgctcccccgtatataaggttcaagatcatcacaagatccaaacacaaacaacacacaagaagtgagttatcacattcctaactaatagagaaaaataaaacaacatataggtataaatattatataacaaaatacaatttacttgagcataactcacgttatttcaccacacatctcattcgttttcacaacatttgcatactcaatagtcaaaacacaatatcatcaaatcaatcaatatagaacaatacacaagcgttatgcagcagatatactaagactcaatcttatatgcaatgtagtaccatgtcagtgaaaaatctcgtcgcccttaaagggtcttaacattaactcatcgcccttaaagggtcttaacattaactcatcgcccttaaagggtcttaacattaactcatcgcccttaaaggttcttaacattaattcattgctcttaaatggtcttatagtcgtgtgattgtacaatctatagtttacaactcaaatgcacacaacatctcaatcacgtgcatactcagtttatcacatacactcgatctcaattacaatgttataatatcaaaatagcatgttgtcacacctcatgaatcatattcactttacctatgaactatgcaatacttgacatggactatgtgaagtgtcctaaggttcaagatgaaaaaatggagaaccttgacatggacttcatggagtagtctatggttcaagttggaaaagtggggaccttgatatggatttggtggagtggccagcggtttgtctaggagaaaattttgtttttcatttattttattttgaatgataaaaaattgatagtttaaaattaattatgggttcaaattgcaagtaatagaatatttgaattttataatccaagactttttcttatttacttaacacaggtgtaacaaaaggatttgatgtaagctactcaaatattaaaagaattattaatatttttgtaagataaatttttcattgatttaagaaattatatatggtaaactaaaataaaaaatgttcattattttagtatttggcacaagaataaattatatttctttgtagattgtttaagttatcgtatgaatttgttttttttttagaatattaaattgaacatgagtatttttatgattgtttaaatttggcacttgcaattatttaaaaagtaaaatggaaattaaaattatgtttctcctcttatttacattgatatcttgtaaaaaatacaaaatacgatactggtttttttgagaaaaaaagttaatattctttttcacacttctttttatataactaattaatttttatatgataaagaaaataatattcaggtttgaatacaattagaaatacatgacacgacaatctttccaattgatgacaattaaatttagtcttttttcatatatgagagaatattattttgtgaattgaaaaattgatcaaaattaaatagctagattgtaacaagagaatctttttttttatatagatttttgaattgaaatagtctttaaagtacaccattttcctataattgatttattcatcaattatatattttttttcttgcttgacgtaacttgcaacatttgttgtgaatgacaaggaacttgataggaagatagtgcagtgacctacggttaaagttgaagaagtcagaccataacatggatggactttgtggagtgtccaaagggttcaagatgaacaaatggaaaacctctagatggacttatggtgtgggctatatatgtttaatttagaagacaattttcttttacattatttttagtttgaatattgaaaatttaataatttaatattaactatggcttgggatatcataaaatagaagacttgatttttttaaaaaaaaattggacttttattgtttacgtaacaaaagtttaacgaaaggattgattaaataatagttaaaatatgaagtttaatgacacaaaattttcatttaagcagttctatagggtaaattaatataaaatgattcttatttatttttgtaaaaaaaactgtaccaaaaagaatgtttcttattttagtattcagcacaagaataaatcatatttctctgttattaattttgatttcttttatgaatttagtgtacataggaattttaaaaaaggagatagatacagtaaatgcataatttttcgtattctaagaattaattcgggagaattggataattaagtcgataattttaaaaagccagcttaaaaaaagaagtgaattacaatgttaaaaaaatattttagtatttggcacaataataaaaaaaggcaaaaaaataatgaaagtgaagaaaaaaaataggcttaaaatataattgttgtctttttttttaatatgttattttatttttttatttaaatattttatctcttatttttttaaaatcttgtaattttagtctatttattttttaattgaaatatttttaaaaaaatatgtcattttagtccatttgataaaattcttgtttttaaattaggatattttgtcctttaaaagacaataatatgactggactttgtggagtgtccaaaggttcaagatgaaaaaatgaaaaaccttgagatggatttgatggtgtcagccatggtttgtttagaagacaattttcttttacattatttttagtttggatattaaaattttaataatttaatattaattatgggttgggatatcatgaaatagaagacttgaattttttttaataaaatgttgaacttttattgtttaattaacaaaattttacaaaaggattgatcaaataatagttaaagtcaataattaaaaaaggagatagataaagtaaattcaaaattatttcctattctaagaattaagtcgggagaattggataataaagtcaataattaaaaaaaggcaacgtaaaaaaagaaaaaagaaaagaaaggcgcttgcatcagtataaataatagaaagaagtaagtttaatatgcagaagcaagaagcacttatacaattaagctgtttcatatattcttgtgtgatcatgaattcctcctttttttatattcttgtctttgtccagctttggttgttcagcttaccatgcagagagagtgtgtgtatcccaagtgagcgtgagacacttttgaagattaagaataatctcaatgatccttcaaataggctttggtcttggaatcataatcataccaactgttgccactggtatggagtcctctgccacaacgtcacttcccatgttcttcagcttcacctcaacactacgttttctgctgctttctatgatggctactatcacttcgatgaggaagcttatgagaaatcccagtttggtggagagataagtccttgtttggctgatttaaagcatttgaatcacttgaacttgagcggcaattatttccttggagcaggtatggcaattccttctttccttgggacaatgacttccttgactcacctcgacctctctcttactggattcatggggaagattccatctcagattgggaatctctccaatttggtctatcttgacctcggaggttattctgtcgagcctatgttagctgaaaatgtagaatgggtatcaagtatgtggaagcttgaatatcttcatttgagttatgcaaacctatccaaagcatttcattggctacacactctccaatctcttccttctttgacccacctagatttgtcaggatgcacactccctcactataatgaaccatccttgctcaacttctcatctctgcaaactctccatctttccttcactagttattcccctgccatttcttttgtccccaagtggatattcaaattgaagaaacttgtttctcttcaattatggggtaatgaaatccaaggtccgattcctggcggtattcgaaacctcacacttcttcaaaatctttacttgtctggaaattcattctcatcttctatacctgattgcttatatggtcttcatcgtctcaagttcctcaacctaggggacaaccacttgcatgggactatttctgatgccctgggaaatttgacttctcttgttgaacttgatttatcaggtaatcaacttgaaggaaacattccaacttctttgggtaatctctgcaacttaagggacattgatttctcaaatctcaaactcaaccaacaggttaatgaacttttagaaattcttgctccttgtatttcccatggactcacaagacttgcagttcagagttcacgactttcaggccatctgacagattatattggggcatttaaaaatattgagcggctagatttttccaacaactcaattggtggtgctcttcctagatcatttggaaaacattcatcattaagatatcttgatctgtctactaataaattcagtggaaatccatttgaaagtcttggatcactctctaaattgtcatctctttatattggtggcaatctttttcaaactgttgtcaaggaagatgatcttgcaaatcttacaagcttgatggagattcatgcatcagggaacaatttcactttaaaagtaggtcccaattggcttcctaattttcagcttttccatttggatgtgagatcatggcagttaggtcccagctttccatcgtggattaagtcacaaaacaaacttgaatatttagacatgtctaacgcagggattattgattctattcccacacagatgtgggaagcacttcctcaggttttgtatttaaacctctctcataatcacatccatggtgagagtgggactacattaaagaatccaatatctatccccgttattgatctaagctcaaatcacttgtgtggtaaattaccctatctttcaagtgatgtgtctcagttagatctttcaagcaattcattctctgaatccatgaatgactttttatgcaatgatcaggacgagccaatgcaattacaatttctgaatcttgcatcaaataatttgtcaggagagatacctgattgctggatgaattggacatttcttgggaatgtaaatttacaaagcaaccattttgttgggaacttaccccaatccatgggttccttggcagagctgcagtctttacaaattcgtaacaacacattctcaggaatatttccatccagtttgaagaagaataaccaattgatatccttggaccttggggaaaataatctttcaggatgtattccaacatgggttggagaaaagctcttaaaagtgaaaatccttcgccttcgatcaaacagttttgccggccacattccaaatgaaatatgtcagatgagtcatcttcaggttttagaccttgcagaaaacaatctgtctggcaatataccgagctgtttttgtaacttgagtgccatgacactaaagaaccaaagtacatatcctcgtatctattctgaagaacaatatgctggtagctcttactctttcaactatggaatagttagtgtgctactatggctgaaaggaagaggagatgagtacaaaaactttctgggtttggtaacagacattgacctgtcaagtaacaagttattagggaaaataccaagagaaatcacatatctaaatggattgaattttttaaacttgtcccataaccaattgattggtcatattccacaaggtattggtaatatgagatcgatacaaaccattgatttttcgaggaatcaactttctggtgaaatccctccaaccatttcaaatttgagctttctcagcatgctagacttgtcttataatcatttgaagggaaatattccaacaggaactcaattgcaaacatttgatgcctccagctttatcggcaacaatctatgtggtccaccactgcccataaactgcagttccaatgggaaaactcatagttatgaaggaagtgatgggcatggagtgaattggttttttgttagtgcgacaattggatttgttgtgggattctggatagtgattgctcctttactgatttgtagatcatggaggtatgcctattttcatttccttgatcatgtgtggttcaaacttcaatctttttactcatgtagtatcagtgtttagtgttgcttagaatacaccgatgttgtatcattgtattggcaggttgatcaatttatgtcaacaaataaatttaaacaaactaatccattatatttcaattttcagtaatgttatatttaatggataagagttgtaccgtgggaattgttgtcattgcatctaaatacacaagtgtatctatttttttttaagttatgtttctttgaaatttattcatatgtttgaatctctcttgaaatgagatttcaaatattcccttgttgttgggtaatgaaatccaaggtcgatccgattccctggtggtattcgaaacctcacacttctttaaaatcttgacttgtctcaaaattcattctcatattctatacttgattggttatacggtcttcatcgtctcaagtatttggacctaaggtacagcaatttgcataggactatttatgatgtctggggaaatttgacttctcttgttgaacttgatttatcaattaatcaatctgaagcaaccattcgaacttcttgggggtaatctctgcaacttgggggagattgatttcttatatctcaaactcaaccaacaggttaatgatattttagaaattctagctctttgtatttctcatggattcacaacacttgcagtttcgagttcacaactttcagtcaatttgactgctttttaccattcagggatatttttcaaattattttccaaaagacaataagtcttatcaggtgctactatatatgagttagaagtcataaaatcactcttttttaatggaagtcataaaattatttatgactttaatgtaattttttttatttgggacttcaaagtcgttaattttcttttttaattttacaactagtcttttttaatttttttaacttaagactttaaaattgtaagtttaattttttttatttttatgacttttgaaattgtgtttcgttttttttacgtttaaattttttaattttaaaattttttacttacttatattttattttattttttttaatttttttcaaaaattataaaaaattatttatttcattattaagtaaatattttatttattcatttaaaaaataaaattctataacattattttaaatttatctaaattttaaatatgtaaaatatattaaataaaataatattaaaaaacataatatattttaaataaaaaatattaaaaaatatataatatatttagtaaaaccataaaaaaaatataatacaaatcaaataaaactaatagtatgaaaattttccattttaattattttttatttatcatatttggtttatttaaaatttagataatcttttaataatgtcattgaatttttttaaaaaatgaataaataaaatatttatttaataatcaaataaataaaattaataacattttaaaaaaatataacaaaataaaaaataaaatacaagaaattaaaaaattctaaaattaaaaactttaaacttaaaaaaaaaaacaaaatgactacaaagtcgtaaaaagaaaaataaaataaaaaaacaaaacttatcactttgatatcataataaaaaaaactattgactttgaagtcgtaacaaaaacacaaatgttgtaattgattaccggcttcaaaatttgaattcaaatttctaaaggatgttacaaaacgtttaaaacttctggtaatcgattacaagccttgtgtaatcgattataggctttaaaattaaattcaaattttataagagcattttagaaattaatttgatttgattatgggtaatcgattaccagagagtaaatatcactaatagcgccaagaatgagaatgaacataattttcagcaactttgatatgtagactctaggttagtattaaaaacataaaacaaaatattattgtaaacataaagatgaaaattattgagtctaaccttttttatgaaaagaggagagtataagggaggaaaggaagaaccaatagaaaaatcaatttttgattcaaaatgttcttgcccctgtagctcaatggtacgtagagacttcagtcttgcaaactgaaggtctgtagttgcacactatgggggcatccaatattattaatttttttcacttgatcatgaaaaataatgttgtgttatgatataaaaacatcatacataattttcagcatgagatagtttctgtatgaggacgcagtataggagcaatctttttgttttctttcaaacataaagtatcgcaggtagtttggagcaacaggttctccattgactagtagtagtagctagtgaccaaacttaattcctcattatcatagccatcatacaaacctagctcacactgttcacttgcatcgatatgatcttgtctaactatcacaccataaaacactaagtgtattgatcaattaatgtaatcttattttagtttaattggaagttttaaattttaatcttaaatatataattacattaaatatttatatataaaaacgtatcatctataataattctatttctattgaacaagtagattatctttaataaaaaaataccttgtgatttagaaataaaaaactataacacagcatcaatttttacattgctaattaactaaaaataattctaatttttatcattgaatgcatgaattatatatttgacatacggttctatcttaattaaattgatctaatattgtaacaaaaacaaattgatctaatattgtatgtagttacttttgttttctatttatttttatcttttatgaatacgcatctaaaaaacattttcagaactgaacacacaaaatgatatacgattataaattgtctaataaattataagttttgtctttcatgtatgcacaggtgtgtttcttcccaaattgtgtgcagtagcagaaggtgcaaatgctcgtcgacaaatgggtgagatcaaaagctcaggtatggtggcattgctccacaaccttttgatgatgtagagctctcagatgaatctgccattgctccattccctcaatactaagtagtttctcagactcttcccattgaaaaccagtgtagccagctttcattatttttggttaatatttataaattgttctttagtactgattggtctgaatagtgtgatagattctaactttttaaatgaatgattaagaatttgaattttatcaacttttagttcttcatccttctacgaaagtgattattagtctctcaattatcttttgggcggtcttaatctataattctgtttgtcattgctcagtcactttcataaataaaaaatcactgttaaataatgatgatgtgataatcatatgatttctcacttgggttatgacgtaaaaatcatgtgataaaacgttgttaaggtattacaaatattttgtcatcagtgtaaaactgtcaaaaattaaaattttgaaaaaaaaagaaaaagaatatataataaacaaaatcaataattcacaatacacaaattaaccttttagcatgtgattattatatcaaaatctttttttttttggtaccttttcaatttgtcattcaagtctagaaggacctatgtgtggacttctaaaggagtccatttatgagtgaaaattttcaaaatttgtttatcgtatcgtagaaggctaagtatataggattttatattgctattcacattacccatgtgggtagaaaattagaaaattctagaagtattctttttacataaatatgattttgttatacaaatatacaatagaattatatttttattacattgtttgggacacaattctagaagtagttctttgtgttcggtttcaaaatcattaaaaattaaactcagtttatgtttggagtttttagtttcagtttattttaatttttagattttaaaaaattatttaatagataaaataatttaaatatttaatcttatcacactccaatataaaatcatgtaatattaaaaaaatattgacacaaaaataaataaaaaagaattaaacataataaaaataattaaaaaatattataaaaaataacagtaaaggttaaaacataaacaataatcaataaattaaacaaaattttattgtttgttgtatgtgataaaaaccatttcagaaagatgtaaaaaatcaacttagtgcaatttttgttgaacatgtttgtatttcgaaattatattttaaaatggaaaattgaaaattgacaatcacccctaaggcgaccttaatttttaaataagtaaaaagtattgtatgtgtggtgcacagggcagagattaatataaagccatggcatattttgttgggagggttgaaagaaggcactacgaggataccatggctgaacagagagccttatgcttactggaaaggtaatccagctgttgctgaaaccagacaagacctcattaaatgcaatgtttctgaaaatcaagattggaatgctcgtttatttgcccaggtatcacacttcttattagctttgtttgattacacttactgaaagtagttttattctttggatatgaaaaaattaattttgtacgtaatatttcttataagcaaaagtttcattatataaaattggcttaagcacatggtgtgcagaaactagaaataacaggcaaattcaagcaacacaatggccagtaccaatattgtatataacattatacacttttttaacttttaatcttttattaatacacaacttaaaagtacattcaaaatcaaaggaaataacctgttattgaacattactgattttttccttctaaacaatatattttgtctgttaattgactcacaataaagccacatatatagcttccttcttgacaaatgaaaattttgtttcaggattggtttcgagaatcacaagaggggttcaacaaatcagacttgccaagtcaatgcacttataggtataacattaaaactgtccattcatgcttcagttataattatatgtaataatatatttttgttattggatatataagttcagtttatcaataaataaatgtttcaattcaatcatgatcgtgcagatataaggtgtacattgaaggttctgcttggtcagtcagtcaaaaatacattctgtcatgtgactctaccactctacgtgtacggctacatgtttcatctcctgaattcatatgctaaactcttcagatacaaaccctccataagtgctaatgctacagaactatgtgtggagtcaatggtttgtggagcagaaggatcagtaaagaaatttatgatggaatcattggtcaaggttcctgcaaataccgacccttgcaccatgcctgccccttttgatcctccaactttgtattcaacattacagagaaaggaaagctcaattcaacaagttgaatcatttgagaaaagttgttgggataatcaaaccataacatcttaatgaatatttgtttttccatattcaacttaactcattcattcttagactatcttgggaggatacaagtagaatctagattatcttgtacttggctaaagaaaccatatcatgcttgacgaattatcagttttagactttacgaggaaaaaaaaattagtttgttaattttgtaaatatggataccaaaatgtaaaatttgatatcaattaagttaactaatgaatcaaatttgtaaaatttgaaaatatggaaacgaaccgagcaattgaaaagtgggataccaaaatcatcctcaagtgtacttaaaaaaaataataagattttaatttctattgcaacaagtcgttatttcttattagagataaaagaattttaggactgaacaataagatttgtgtaacaagcatttagttgtatgagattaaaggcaaaatgctcacaaaaataaatctccaataaggttttgcaataatatctattgtgagtctgtcagagatttaatacactcgagtgtaaatatttttacactatcaactaatcaatggtttacgtttcaatgtgatatgagaatggtaatatataggtagtatttgagttaagctcatgaaagccaaatttgaagccctgcaactgcaaccaaactttctaacaatctcttcccgatataagacgcactattcttagctgtggccgtttcatctatcccttggtttctaccattctgggaacttccttcagctgaatgcacaaaagaacacattaaaaataaatgcaaaatttagtactacaccattgaaactcaaatgtcaatgtcaaaaataaattctaaaaatgaaatattttgttgaaaggatcactaccagaagtagtgggcgaaggactgatagaaccaccattggatttctgaccaatttgattaaaagcttgagcttcaggtgatttaggatccaagtgcagaagtgctgttcaaatcgtttcaaacaagaatttcttgagaaaaaatcaaacctcaaatatttttaactttcgcagttgaaaactcagagataacagatacacaaacaaagtaaaattggcaaatttagatgccctttttttcccctttaaaatgtgttattgtctagttatgaatgagaaaagtagaaaagtttgaagtacatgacttgttgaccattcattacatagtaaatggaatgtaacactcttttgttctttaaggaaaatgaaaggcttgataatgataaaacttagaccacaaatattctgatttttttagaaatatactaaaattggaagatttagggcctgagtattctcagttaagaaactgttttataaaataattttagactacttagtaatcaatttcttatccaaaatatataagtttggagaatcctatccaaaataagtgttctaaaatccaaaaaacaaaaacaacgggaaattgttttctcagcttcttctgttttaatcttattcaagttccctctcaatttcacattctgtgtctcacatcattctccgccaaacagtctgaagaactgatagcagaggctatctgctaagagcaaaacgaaggaaataaagagaagataagcaaattcaaattctgttctgtgctttttcattccttttctcttgatatttacaggcttacactgcttattgttttctagcagataataacaaactctgttataacagaatttgaggataacagaatttgggaaaagcactatctctgtcccctaactaactgcagtgcactaatgctgtcgcggctaaacgtaatctctgaggtgagtgggtctgttgtggttccttgctggtctgctattagctgctacctctggttcttccgtaatgttgttgttgctatcaagaaccttgtttagttgtatcttgaaaactaaaaatagttttgaaaatagaaataaagactcttttttttcctattaaaaacatgttatcatcagacaatgaaagataaaaacattagttgttatatggccactaacaagactcattgcataggaaatggaaacataacactgtagtgtagtgttcttcaagaaaaaaggaagacttaatttgaaattgaacataccagagcactgtgagagattatcaggtgttttgcaaagagaagggagaccaacagcaattgtcatgttaatctttaagccaaggtcaggaacatccctgtctttgagaataaggcagacacacttcttgttggtcttcatggcttgtgtgagaccaccgcaacaatctgctgtgggtgctttcgcgtcagcacccaaatatggcagacacgttgcaacacctgtcagggattctgcacatctctgtttgtcttgagctgaatcttccattgcatgactaaccaataccaatgttattgctaacactagcaagtgtggtagacaagcatttgaatccatttttcaatcttgatgaatgaatgagtggagatagattatattatagtctatggaacaagtttagaatgagtatacagagcagggttgtagctagaaattgttaagttgtggtgctacatgtaaaatgttggttttttttttaaaaaaaattattagaaggttttgtagtgtgttatgttttagaaaacatgggaattgggaaggaaactagtggatgaaaacaaattctgtggtttcattgtgaactcactgaagaagaccagtttgttgacttagtctggatcatttcaattttgtctagagcttagtgttcatgagtgtgaatgtggagaagcttgacggagactggaagacaagtttcaaataaatattgacggtttttgacttattagaaaccaaatgttaccgaatatttaaccgatacattattatttaactaataatagcgattcaaagcaaaagatttcaaatattagagattttttatgaagaaaaaaattgtcaaaagatgaaaaagtcgaatataaatcatggattaaaaacataattttattttcttaaaaaaagtacattttcctattccaaaagtgttaaattctctcatgttatttgtttctgaccgactctctttagtgtccaatttgcggatgtgaagggtagaaagacccaatgacaatgttgtcatcaaatttgaaaagaaataactataaaaaatatataaaaaaaacataacactaatagaccaaaacactatatgaaattaaatatgtttttatccataataaatagttaatttttatgtttgttttttaataaatttttattttatattgaatttctaataaattaacatttttattttttatcttatatcttgttttagtctatgataaattaaaaaaaatgtgtgtactttctagtaaattttattttaatatgtattaataataaatgaaaaatatttataatgaagaaaaaaaaatttattaggaactaaaaataagtgtttattataaaaaataaaattattagtttattaaaaatttatcataaattaaaaatttattataaaatatatataaaatcagatatttattaaaaataaaaaatatattaaagccccttaaataattaagcagtacatgtgtgggatagtagacttccttcttgcgaacaggacctgatcctgagcgtatttttcatatttgtccaagcaaaaaaaccaaataaagtgaaacaatgtttgacttcctatcttcaaagttaaaagttaagtctctggagaagatggcttcgataaagacacaataaaactgcttctggagaagagggaatttcaagacatttgttcttcccttaaagcaacttaactctaatgaaaacgttaacactgaacaagaggttatagtcgaaaaccaactaacattccaaaattcctcactaaccatccctattatatttgacaaccacacccgtgatgaaaattatagtgcggtctcattccactgtctcaataaataaaaaatatacaaaaaatcacaataaggatatgttaattaagaatttaatttaaatacacttagaattgcaattaactatatatattctcctataactttttttagtaattgttttacaaatcattaggtgatatctaattaattaacaatttaaatttttacactgtctatctaaattaaactcatgtattaacatcatcaaagttattttcgttttagttttgatagttttttttctaattaagtactactagtagttgccattctcattattttattatacgtacattctaattaacttgagataccattaagataaaagtggaatgaaaaaaagagcatcaaagtaggcgtacgtatggcgtcaagagtttcatcacttgttctgtgagggaaacaaaaaacattataagttcaaaattcaaagcaaaagaattccttttataaaacacatcatttgtttctcaattctcctaagaaaaaaaccacttgcactaatgggttggtacaagggtccttgtggcagccaacatgcacaacaatgcaaattccctgacttggttaaaaaggctaggaaggaattcgtaataaccactgaatcaaagtcttctgtaacatttggaaatatgtgagtgagattttcaaaacaccaaacagttatagtatcaaatgttgtatcttcaaacttggtttctttccgttaggcccatatttcttcttggtatcagaacgtatcctagagccattcaaaaggattacgcaccatgcccaaagagtgttaaacgtgagggatgaattaaaaaaaaaaaaaattcaagtctcacattggttagagatagtcttaagatagagtttataaggtgagggtaatcctcaccctatgaactagcttttagggttgagttaagcccagatttcttctctttctacccaaatagagttgcaaaaacggaagactgagagcttaattagatagaattcaaagttgcaaattccaaacctgtttttacaagaaaaataaaaggtttaattatccttttgtaaagttacgacaatatttctttttagttcttatagtttaaatcattctattatagtcccggttgaattttttttttttttttttgactctttgattctcaccatcaagtttcaactaaagtcaattgttgaaactaatgttatggagagggcaaagacactctcctatgcacacacgagacatggctgatcatcttttctctcaacaacaaaccggcacctgcaacatcatcccaaccatgaaggcacaaactaccacacctcgatctgttactcatggaaccagaaactcacaatcacacactttatctgcagcaatcaaaaccatcatcccattggaacgatcaacttagttcaatgctatgataccactccaacttgatgagacacagtaaagaaggagattacatcatggcaattggcaaatgctaagctttcagaggtcggtggcagactcaagaataatggaatgtgtagtgcctttgtctcatacctccattacacttcagttgtacctgagcttgcttccctatttttattaattttgttcatgtttatgtgtgagttgaatcttccccgcgaggacaaaaaggtaaaaaaaatgaaaatataggaaccaaaatgaatgtcttaaattataggaactaaaaaaaattatcacaactataaggactaaaagagtaatcaaatcaaaataaaataaactagtgcaaaataatggtggtgtggttagacacttttaatcctaaatgtctcgttgttgacatatattcctctacatatgtgtgcattttgcaaccaccaccattagtggagtaaaattttaaatgctaacccttctacgattagtcctatttgacacaacttatcaggcagaattcccacgagcacccaacttcagagctttgaagaacttagctacactggaaatcctgagctttgtggtcctcctgtgacaaaaaattgcacaaacaaggaatggttgagggagagtgcttctgttggacacggtgatggtaatttctttggaacatcagagtttgatatcggtatgggagttggatttgcagcaggattttggggttttggcagtgttgttttcttcaacagaacttggaggcgtgcttattttcattatcttgaccacttgagagatctgatttatgtgatgatagttttgaaggtaagaaggttacttgggaaattatgagtttacctgttaactgttaagaagtgagacattacaacgtgttggtctagccattaaaaatgtgaaaaggtttaccatactatgtacctgttcatctgtggtgttctgtcggttttgctttcattggtattaaatgttcttaatgttaagagaactagacgagcttgagacttgagtatcaaattctgttttgtatttatgacgcattattgtcttctactatctgtgcactaacaatgattagcattaaaataactgaaatgacacactcggtgattggatttaagaagattgttttacacaacatgtaactaagaatttgcctgaatgaatttaattagtgtagaaagttggagcttgcataggattctgcagtttctaagctcttccacatcttccttctctcgcttttccttactctgatacactccacattcccatttcctgagtattgatgcatttattctataatactcattaacaagttcatttgacaaatcatgattgattaaattttaaaaatcatgaaatattacttttttattcataatagttcctatcgttttatacaagggtcactagttgtattgaattccctcatacaaaataaagtttcaagctatcagatatagggtttccatcacacctgtatcaccagtgtatctttataaaagaaatagggaaatacccaaaaagatggttttccatctgttcattttcttccactggccgatgtctagttcttcatccaccctatctattttcacttttgatctccatgcattacgtaaattaggtattataattttgtaagtttaatttggtcccttacatgtggcttattcacttctgcttccttataactgcaatattctaagggatcaaaagtttagttcagtatgtgttaggcaacatggtagttgtcatattatctacctttcatctagtgtcatgccagtaaatatctgttaaatattcaaagaaagatggatggagggattgaaattgcaatgcctagtggatccaatccaattctcccaattggaacttacaatagaccaaaatcgcacaattactgtacctgaagaataaagaatgcaattaaacttttatattttttatctttaattttaatttcacaaaaaaatcttttcaaactcaaatttagtcaattataatagaaccatacaatagttttttttccagggaaaccacacaatagttttaaaaacatttatgtgcagttttttaattaaaagtcaaatcagaattcaattaatgcattgaaatcaatgtattaattgctttcattctactaaaaacaccaaccttttttaaaaaatttatcaacataaaaaatataatacaattattgaattacaatagcgacaattagacttgcgttttattgaattgtttgattatatttataatcactagatggacctagtgacaagggagtttgactaattcgcacaagggagttaaatattttaataaattatatatttatttttctcttctatcactattcttaaactatcaccacataagtaaatgaaatttagacaaaaactttaatatatgaagacttgtggtctaacaataaatagctaggaccataattttataatttaaaaaaacatgccacacttcttaatttgtagatcttctaatttactttttaatacatggagaaatttggaccaagacttattaaagaaaaaactatgatctcaataattatgatagaccaagttaaacaagcaatttatacttctttatatctcactaattaacttttaatgaaaaagaaaataatatttaggttaaaatatttgagttatctcaaaatttggggatgtagggctgtagtcaggcttacagaacttaaaaggaaaaccataggtgaaagaggtatagattgcatatttattggatatgctgaacattctaaagcatatagattctatgtgctggaatctaatgattctgttgcagtgaactcggttatagagtcacgagatgctatctttgatgaacaaaggtttacatctatacctaggccaaaggacatgaattccatgtcgaaagtctcagttaatattgaggatataccttcaactagtactgaaactagaaagagtacgagagtaagaaaggctaagtcatttggggatgactttcaactctatttggttgaagggtcaaggaatgatattgaatttcaatatcaatattgccttaatgttgaggaagacccaaagatttttagtgaagcaatggcttcaagggatgctgtattctggaaagaagcaatccaaagtgagatggattccatcatgcaaaataatacctggaaattggttgacttacctcctggatgtaagccattaggatgtaagatgatctttaggagaaagatgaaagtggatggtactgttgacaagtacaaagccagattggttatccaaggctttaggcaaaaggagggtattgattttttcgatacatatgctcttgttgctaggatatccactattagactgttgttagcacttgctgctatccacaatctggtgattcaccaaatggatgtgaaaactgcattcttaaatggtgaattggatgaagagatatacatgaaacaacctgaaggatttgttatgccaggaaatgaaaataaggtgtgtaaactgatgaaatctttttatggcttgaaacaagcgcctaagcaatggcatcaaaaatttgatgaggttgtgttgtctagtggttttgttataaaccaagcaaataaatttctatacagcaagtttgatactcatggaaaaggagttatcatttgtctgtatgtagacgacatgttgatctttggtatcgaccaagatcaagttgatgaaactaaggcatttttgtcttctaaatttgatatgaaagatatgggggaggcggatgtgatcttaggaataaagatcaaacgtggaaacaatggaatttccatctctcaatcacattatattgagaagatattggagaaatttaattttaaagattgttcttcggtaagtactcccattgatcctaacctgaagctattacctaataaaggtgtagcagtgtctcaacttgaatactcaagggcgataggatcactcatgtatgcaatgattagtactaggcctgatatagcttatgctgttgctaaacttagtaggtttacaagtaatcctagttctcatcattggcaagctatgaatagagtattcaagtacttaaagggaaccattgactatggtttgacatatactggatttccttcggttattgaaggttactctgatgcaagttggataaccaatatggaggattattcatccacaagtggttgggtattcctccttggaggaggtgctatctcttgggcatccaagaaacagacctgcattacaaattcaacaatggaatctgaatttgtagctttagcaacagctggtaaagaagctgagtggctaagaaatctgatctatgagattccattgtggcccaaacctgtacctcccatgtctatcaggtgtgatagtcaggctactttggctaaggcatatagtcaagtgtataatggaaagtctagacacttgggtgttagacacaacatggttcgggagttaatcatgcatggtgtgatatcagtggagtttgtgagaactcagtataatttggccgatcatttaaccaaagggttaagtagagatctcgtgaaaaggtcggttgtgggattaggattaaagtccatttgaaatctcttatgttaagatacccaattcccatctaatatgacattaggtgctgaattcaatgtggaaagcttaacatgtagagattggaacacatcatcgaaagtatcccaaaagatatgtgttcggttctataagttaaggaggttgaagtataacttctcaatggttcttttgaaaaattgcatttgcaggtgcaagaaagaaaagaactacctatataagcatgaagtttagccgcttcaagaagctgggacttggctttgatatgcttatgaaggatagggacacaggctagtaaactagtgtcgagcaagagtaatgttataaactattgtgcagattatcttcatgtattcattatgaatagaaagggttcaatccttagtgacaccttgatattcaaatatttgaaacgtgtaatttgctaagatgaaattcaatcgtcacgatatttcatctatgcagtagtttgctgtatgttatgactttggtgatttgatcggtaattacactaaactgggggaggtttgttggacattttagtgtaattgatctctttaatgttaaaataagagtgcacgcttgttttaatgtaataacgagatgttcggtttaggcaaatgttggaagttacatgaaagttactaaaacttccatcaacggcaatttttaaaaagaaataacttccatcaaccgccaaaaaccacattttctttgatcataaataatcattctggttcagaaagcataactggtgacaaaacatacaagaccaaaacaaaactcttgaattataatcttctgattttatccgattgaacaattttggttgaaccctgaaatttgattcaatctgaaagtgttatacacgacttcagatttatccagtatcatctcgatttttaaactaaccaacaagaatgtgaaaactgaacaagaggatatatagtctaaaaccaactaacattccaaaattcctcaccaaccatccctattatattggacaaccacacccgtgatgaaaattatagtgcgatctcattccactgtctcaattaaataaaaaatatacaaaatatcacaataaggatatgttaattaagaatttaatttaaatacactttcatttgcaattaactaattatacatatttcctataacttttttactaattgttttacaaatcatttggtgatttctaattaattaataatttaaatttttacactatctatcaaaattaaactcatatattaacagcatcaaagttattttcgttttaattttgatacttttgttctaattaagtagtactagcagttgccattctcattattttattatacgtacattctacattctgcttacaacttgcaatgaatggaaaaagtggagcttggacatcatttgtctgcatgacattcacaccactcacaaaaagtgattggaaatttttagacaaaatagatgaagaattattaatgttcaaccatcattggaagtggaaagttcattatgagaaagaaaagcagttcgccaaaatggaaagcagtatagtttaatgaaagggttgatttgaataataattaaaatttgaagactaattaagccaaatttaattacctttgatgtaaactacttaaagtttaaaaaaaaatcattaatattttcttaaaataaaaatttcattgatttaagcaattctatacggtaaactaaaataaaaaatgtttctagttttagtatttggcacaagaataaattatatttctttatagattgtttaaattatcatatggatttttttttttgagaatattatattgaacgtgagtattctcatgattatttaaatctggcacttgcaattatttaaaaagtaaaaaagaaattaaaattatgtttctcctcttatttaagttgataacttgtaaaaaatataaaatatgatactaatttttttttcgtattctaagaattaattcgggagaattggataattaaatcgatcagcgtaaaaaaagaatggaagaatattttagtatttggcacaataataaaaaaggtaaaaaataatgaaagtgaagaaaaaaacaggtagggcagcagtataaataatagaagtttgatgatttatatgcagaaccaacaactacacttgttttctatatattcttgtgtgatcatgaattcctcctccatttatattcttgtctttgtccagctttggttgttgagcttaccatgcagagagagtgtgtgcatcccaagtgagcgtgagacacttttcaagtttaagaataatctgaatgatccttcaaataggctttggtcttggaatcataatcataccaactgttgccactggtatggagtcctctgccacagcgtcacttcccacgttcttcagcttcacctcaactcttcacattctcctttcaatgacgaccacgattgggaatcttatcggagatggagctttggtggagagataagtccttgtttggctgatttaaaacatttgaattacttggacttgagcggcaatatattttttggagctggtatgtcaattccttctttccttgggacaatgacttccttgactcacctcgacctcgctcttactggattcatggggaagattcctcctcagatcgggaatctctctaagcttcgatatcttgacttgagcttcaatgatttacttggagaaggtatggcaatttcttctttcctttgtgcaatgagctccttgactcacctagacctctctgatactggaatccacgggaagattcctcctcagattgggaatctctcaaatttggtgtatcttgacctgagttatgttgttgccaacggaacagtaccctctcagatcgggaatctctctaagcttcgatatcttgacttgagcggcaatgaattccttggagaaggtatgtcaattccttctttcctttgtgcaatgacctccttgactcacctcgacctctctggtaatggattcatggggaagattccatctcagattgggaatctctccaatttggtctatcttggccttggaggtcattctgttgtcgaacctctgtttgctgaaaatgtagaatgggtatcaagtatgtggaagcttgaatatcttcatttgagtaatgcaaacctatccaaagcatttcattggctacacactctccaatctcttccttctttgacccacctatatttgtcacactgcaaactccctcactataatgaaccatccttgctcaacttctcatctctgcaaactctccatctttcctacactagttattcccctgccatttcttttgtccccaagtggatattcaaattgaagaaacttgtttctcttcaattatcaggtaatgaaatcaacggtccgattcctggtggtattcgaaacctcacacttcttcaaaatcttgacttgtctttcaattcattctcatcttctatacctgattgcttatacggtcttcatcgtctcaagttcctgaacctaatgggcaacaacttgcatgggactatttctgatgccctgggaaatttgacttctcttgttgaacttgatttatcaggtaatcaacttgaaggaaccattccaacttctttgggaaatttgacttctcttgttgaacttcttttgtcatacaatcaacttgaaggaaccattccaacttctttgggaaatttgacttctcttgttgaacttgttttgtcatataatcaacttgaaggaacaattccgacttttttgggaaatctccgcaactcaagggagacagatttaacatatctcgatctctctatgaataaattcagtggaaatccatttgaaagtcttggatcactctctaaattgtcacttcttcatattgatggcaataattttcaaggagttgtcaacgaagatgatcttgcaaatcttacaagcttggaggagttcggtgcatcaggaaacaatttcactttaaaagtgggtcccaattggattcctaattttcaacttacctatttggatgtgacatcatggcagataggtcccaactttccatcgtggattcagtcacaaaacaaacttcaatatgttggactgtctaacacggggattttagattctattcccacttggttctggaaagcacactctcaggttttgtatttaaacctctctcataatcatatccatggtgagctggtgactacaataaaaaatccaatatctatccaaactgttgatctaagcacaaatcacttatgtggtaaattaccctatctttcaaatgatgtgtatgagttagacctttcaaccaattcattctctgaatccatgcaagattttttatgtaacaatcaggacaagccaatgcaattagaatttctcaatcttgcatcaaataatctgtcaggagaaatacctgattgttggattaattggccatttctagtggaagtgaatttacaaagcaaccattttgttgggaacttccccccatccatgggttccttggctgagctgcagtcattagaaattcgtaacaacttgctctcgggaatatttcctaccagtttgaagaagactagccaattgatatccttggatcttggagaaaataatctttcaggatgtattccaacatgggtgggagaaaagctctcaaatatgaaaatcctccgccttcgatcaaacagtttttccggtcacattccaaatgaaatatgtcagatgagtcatcttcaggttttagaccttgcaaaaaacaatttgtctggcaatataccgagctgtttcaataacttgagtgccatgacactagtgaaccgaagtacagatcccagaatctattcttcagcaccgaattatgcaaaatactcctccaattatgatatagttagtgtgctactatggctgaaaggaagaggagatgagtacaaaaacattctgggtttggtaacaagcattgatctgtcaagtaacaaattattaggagaaatacctagagaaatcacagatataaatggattgaactttttgaacttgtcccacaaccaattgattggtcctattccagaaggtattggtaatatgggatcgttacagtccattgatttttcgaggaatcaactttctggtgaaatccctccaaccattgcaaatttgagctttctgagcatgctagacttgtcttacaatcatttgaagggaaatattccaacaggaactcaattgcaaacctttgatgcctccagctttattggcaacaatctatgtggtccaccactgcccataaactgcagctccaatgggaaaactcatagttatgaaggaagtgatgggcatggagtgaattggttttttgtcagtatggcaattggatttattgtgggattctggatagtgattgctcctttacttatttgtagatcatggaggtatgcctattttcatttccttgatcaagtgtggttcaaacttcaatctttttgctcatctagtatcagtgtttagtgttgcttagaatacaccgatgttttatcattgtattggcaggttgatcaatttgtagtcattgctatctttttttttttttttcagagtttagagccttatgtaaattctgttttgggatgtaaagatttgcatattgagcataatattacagatgaattctagttaatgtcgtaatttagatcaactagttgtaattccatgataaaaaacatttgctaaatcacgtagattaagattgagatagttactaaaaaaaaacatttgataaactctttggttaaaaccaagttttgaaaccacgtgtttggtcagttgcttaagttaatattgggtgagttttttaaaattaaagaaaaaaagtaattttgaaataaatattttttatataagcatttttttaagcaagctatgggatgtttcttaaaagaaacaaaagcagtttagataaatatactaaaaaaagttacatattttattaaaataataatttatttcaacaaataaatttaaacaaactaatccattatatttcaattttcagtaatgtgttatatttaatgcatgagttgtactgtgggaattgttgtcattgcatctacatgcacaagtgtatctattttttttaaagttatgtttctttgaaatttatccatatgcttgaatctctctggaaatgagatttcaaatattcacttgttgttgggtaatgaaatccaaggtccgattccctggtggtattccaaacctcacacatcttcaaaattttgacttgtccaaaaattcattcctcatatttagtttatttaaaatttagataatcttttaataatgtcatttaattttattttttataaataaacaaataaaatatttatttaataattaaataaatactaattaacatttttttaaaaaaggaaaacaaaataaaaaataaaatacaagaaaataaaaaattctaaaattaaaaaatttaaacgtaaaaaaaaaaaccaaaatgactataaagtcctaaaaggaaaaataaaataaaaaaataaaacttatcactttaaaatcgtaatagaaaaaacttataattttgaagtcgtaaaattaaaaaaaaaaaatctaaatgactttgaagtaataaaaaaaggaggcataaataattttatgatttaagttaaaaaaaataataaatcataatagatgtttatgacttataacttaaatgttataataagacttattcacttttggggcatgatttgaaaagtacccacatgagaaaaaaaaaaacagaaaaaatttatccctagatgataaaataacccaatttgacggattaaattggagtttttaaaaatattgacatgctagatttttacaacaactcaattggtggtgccatttctagatgatttggaaaactttcaacattaagatatcttgatctgtctattgataaattcagtggaaatcgatttgaaagtctttgatcactctctaaattgtcatctcatgaatatctctaaattgtcatctcttcatattgatggcaatctttttcaaagagttgtcaaggaaaatgatcttagaaatcttacaagcttgaaggagtttcatgcatcagggaacaatttcactttaaaagtgggtcccaattggcttcctaattttcagcttacctctttggatgtgagatcgtggcagtaaggtgccaattttccatcatggattcagtcacaaaacaaacttcaagatgttggactgtctaacacggggattttagattctattcccatacggatgtgagaagcactttctcaggttttgtatttaaacctctcttacaatcatatccatggtgagcttgggactacattaaagaatccattatctatccatactattgatctaagctcaaatcacttatgtggtaaattatcctatctttcaagtgatgtgtttcggttagatctttcaagcaattcattctctgaatccatgaaattagaatttctgaatcttgcatcaaataatttgtcaggagaaataccaaattgttggatgatttggccatttctagtggaagtgaattcacaaagcaaccattctgttgggaacttaccctcatccatgggaatgactacagagatagaaatgaggacgaattttactctgtctttgttctgcataacgaatttagttttttgggacgaattttactctgtctatgtctcattacacaattttggaagatcagctggtaaaaatgtataataaaatttattgtggcttaaaataatgcggtgtttgattttgtgaggtccttaagtggtaaagaaatggtgtgatccacaagttccgtaacaatccaaaatagaaggttgaattgctctaggaatcctatcatcttacaagatttaacattttcaatctgtgatttttttttacatgggtttcaatcatagtatatggtggttaacaagttgcatttaacaagaatttcttgagttgcttctaaacaattctcatgtcattttattaatgtgttatggctaacagttggggcaaaaattggcattaccccattgagaaatgtatctctaggatgatgactgtccacaattatccacaacacttcagtgcaacaaaaactcaatatccatctgctagaaggaacgatcagtttctgactcgatcagtcatagtatatgggagttcactgcctattttccacaatgtcagaatctcctattcggccccatgttcaaactcgattaaaacaaatgcccttgtcatctttgaccacaaatgaagaatagttacagaaatttggaaatagaatcttaaggtttgggttaagggtttctaaaatataggtatttaatttgccacataaatgtcatattatatcgtatgagaggcaacacgaaggccacataatcaagaaagttaactatttaagctaacataaaacttggtgagaacctatggattgcaaacaagcagggaagtatcaagtgagttttgttttttttcacatgaatgaaaaataaatattaaccattagatttgatcatgaatggtcaaattaaaatctaggacaagtgtaaaattacttacataaaccaatgggatctaatttaattggttgaacaggtgcatgagttattgtaaaactctgtagtaattattttttatttctatgaataaaaaacttacataaacttgtttttattatccatttaattttaaacttccatttaatcaatatcaacctgtataaattcataaaaggtatagattttgttattatcaagggtatatgtattggaaggaaggagtaaagttttttgggctaaatctcttatgggtaatattttcattctttttctattatcttgatcaaataacattttggcttttctttatataggttttcagaataagagggtttagtggtaattaatattgaaatcaatagattgtatgacaatgcaatgatgttttttaataagaattttttttaggtaaattggatcccagagactaattaagactagggtagacttcttgagagcatttacaaaaattaagataacctcaagactcaaagagatatttataaattactcatctcaaatgatatttgaattggagttattagataaattacatatccttaaaaatcttgtttttgtctgaaatattttcatttttttggatgaaacaactaaatcaattttttcaaattatttaaatgatttatgtaagatcacaaatggtaactcatttgttttttaattacactattaaaagttggactttcaatctaactaaatcttacaaaaccgaattgaaagttggggagggtgtcaatcttgtaagtactaaattctagtcaatgtgtgatatcaatactaataaaacctgcttttatattacttgtacaaacattgttcaatgaatttcattcctaatactagctaagaacaatctcagctccttcgctttctgcttgcgttcaacggacatgtcattttctgaatcactcaaattaatcacttcaatatgttggtcacttgattgctgacattttgagaataaattggatttcttaggtggggaagggctcagaagatctatgatctcatttttatctatactggaaaccacctcactgctagtattctgaattaacccagtgtgttctatgtcatgtgataggggcaacaagtctgtggtattcagatcagcttcagccatatcagttgtaattcttgatatccttcctgaagaatcagaggcattgaagttggcttcgtctctcaaattaatatcaagcaacaaattctgaagttttagatcaagctctgccacagatgaattagtttcctttttctttggttttcttttctgaatattttgtttcttccgttgagcttttctttcctcgaactccaaaatcttctcacgacaagcactgtagatgattaataatgagacaatgatgaaaggcaccctaaacaaaaagttatcttatatatccaccagccttcttgaatttgaattgttctaaaagatacttggtatagatgcagcaataaaccaaacagcatactaactcaagttgcaagcaaaaaataagcaaaatatacatttgataagaatcagataaaacatttcctttctgtgttttagggagtaaagtaagttcatcaattatgtatttacattacctttctataagatctgcaggtactattgaagtttcaagtccatccattccttcccaagaaacctcgtagcattctctcccttgaactcttcggctcttaatgatttctgacacaggacacttcacagggatctgtgatcggatataatataaataagattcttgtatatatccaggttcaaaaataaggagcctgtagataaaatttatgttcactaataatagtaacggcattatagaaactcgatgaatggaagatttccctgtttattgatgatacactgaatgcagtagaagctactgtaaatcaatgatcatcgaagaattgaaccattgttataattaccaaaatagaaaatttgtagcatacttacattacttaatcaaatggacagctttgatcttagatgatgaacatgtgaaagagaacatcagttatcaaaatgccacgtgattctaagcatgagcagtcactcttttatttagtttaaaataatgtttaaatattaaaacttttcacatgagctctgacagtaatgaaatcttaattaggtagtggaaagggttagcagtacctcatgtaaaggaaggttcagtccaacttcagatgaagttaaacgcaaattggcaaatcgtcgtaaatttctttcagctatatttggaaggatatacccatctatttaatgaaatgtaaattagcaacacaaaataactatgaaaagtccaacacagctcaactttatacttccaatcactaagaattctgagttagattaggactaaatgtaaactctacaattcattacatgaccaatgaacaaaatagtctttacttagtagtaagtgctcacagttgtgcacccaggccacccccaaaccacaaaataaattagttgttaagacattttactataataaattattcaactggaggtatgaattgttgatctattagaatatgtcaaagaagacgaagaacctgttttctctgaaggccactcaaagaatccaacacatatctgctggagtttagtacgttgaaatggatattgagcaagagccctatagagatgagtaaattttaagtagctgacaacaatgctatataatttatattccagatctaattcatcaggttacatcaaaaataaaattccaattaagaatctcagaagcttaattaaattttaacaaaacatgtgatatctgtaactgtttcaaatggacttcatatctgttttcagaaattaacatttatacctgattagtaatcagtattaaaaaccataacagaaagacatgacctttcttagctagaaagagaatgagataagttaacaataccagacgtaaattgactcagtattcacatgttcggattagtgagtatattgaatatatttcaatcagtattaagaatcaatctttatgagtggaaaccatgaatgaaaaagataaacctacttgtgcacaatatctgaatctgcttggtgacattttggcttcatataagcattaattacttgtaaaatgttatcatccggccgtaaatcattcttacctcctgcatagacaaaagatagaagctaagatacaatgttcaagagacaccaacaatcctccatttgacaaaaataattattaactgcaagtcaacatttgtgtacaagttaatgcagacaatgcattctagaagacataaaaaaagcacaaagatattaggtatataattccatcctttggtttagaattagatattatattgggcccactttaacatctcattgcttaacaatttacatttatatggacagtaatcagttagtgttaatttagcttttttctaatatactaacttagctgatattatattttcagatagcggagataattggttcatggcatggtatcaaagcatgcatgattagtagcatgtttgaatctgagaccatgatccacattttccaagaaattttagtcaaaattttaaaaatggcacaaaagcaagtatcttttgcttcaatttgacatgcattcacaataatgagcaccgaaccaaacaggcactaagtggtctagagtttgatcattgttacccccatttttctaataaaaagcagaatttcaaaacaaggtaggtgagcattcacattatccatgcttcaagccaaaaggttttggcattttgctaatggaaagggacatgtaagagactaaataattcagactttaaagttctatttattatatataaatatatatatacagttaataacctgtaaacaaaatcctgatatatttgttgacaaaattcttttaaaaaaattaaaaccgctctttgtcaaatattaatttggacagataatgtccctaattctctgaaaagtttacatatatagtaacaattctgagttgcatgcaaaattattacaactaaatttattggaaaaaaattgacaaaaagtaacagctgtataatattaagattaagattatcaaattagaatgtaatatagaaggtataccttttctttttttgacccatccaagtccttcagaagcaaatttcttaagaatatatttgtctccaattgatttgactatctgacaagccgactcctacagccatggaaaaaataagcatatgtaaaacatgtaatttccagccctgttaaaaacaaggggtgaaaagccaaaaaaggtaatatgattatgaaaaacaaatttcaggacttactggacccagaccatgaactccttgataatagtcactgccaagaagcaaggagagagcaatctgaagatcacaagtaccttggttactgattttcaccagaaaggaacacaataaccttgattcaacatatatatacaattggaacacttattgaataaaacataaatgtcactaatttcattattacttattagaccatcaacgtgtgtagggaagaaaggatgggataaaacaaaacaaaactatcacagacatgcatgtaaaatttctgtattcaatacaagacatgaagaaccattgcatattcaaacaattgaatgtcaaatgtcaatcatgctgatacattctgttttaacaggcttttcaattaggcttcccgtgatgacattaagtgtaaagaaataatttaacctactgtccatggacctaactttctcttttgggccttcacatgcatcaatctaactgaatttgtattgcacaacactgaacaatgaaagatcatctattaaaaaaataaaaaataaaaaagtgaacattgtggtaagtacattgaaaagtcaataagtaatttaccaatgagtcccttccaaatccaagttttctttcaatatctgtcatctcataacaaacaacatatccaccatctcctaactcattaataaacaactcatcattagtcgtatgaaaacatacttaatgcaaagaaaattcaccaatgataaaacaaggttgtctactcaccaaggcagatatccctatatactgtccttgcaccaaaaaggaatatgtctgaatctgaactgaaacacccatcctaccataattattatgaacgaatgacaacaatacagataggttagccaacagcaatagcatcagcatccaatgaatatcagaaattacaaagtaggtacaaaaaggaatttgaagatagataagtatacacagtacttacgcataatgattcaaaattcaacaaagcacactgagcttcagcttcttcaatcctgaattttagtaaagagcaaaataaaattagttcaaattgtgcagtaacttctttattatccagcaatgcaacttttccaataaactaattcaacaacaaagctttattccactaggtgagctcggttacatggatcacacgacaccattcagtacggttaaaaaccaaagtttcagaaatattattcagcttgataacaagacattaagcacattttcaatgcttttatacaagcataatgcaacaatgttgagcattttgaatctcttacaatgaatcagtgcactcatatatagaggcactaaataaaaggaaaaattattagtcaagttgacaactgttcaacaatcaacacggtaaaagtaaaaaactttcttcttgaactattattagtattactattataaatttacaaagaaattttcatttgttattcaatctaagtaaaatatatttaacactaacaataacaattaccagacacaatatgagtgtcccctgaaagaaaacactgaaccttaacttcaattcaataatatattacccatttaaacaagaaatgccaagagccatccccaagaccttagcctctttgatcatgcaagaaaactcagaccccatgtttctctgtaatgaagtcgctttctgtaagttagtttcattttgtgctacctgtacctgcttcattattattgactgattaaagttagtataaaagaaagtaagaaaaagtaaaagcaataagtaaaagaatggaagatgtataaagtatatacaagaaactgcaacagaaaaaaatatgagacagctacgaacctcctttccaacatttaagcgacgcctataggttgataatttgatggcaggaatagctccatctaccagatatcaaagattagtcattgggaagcaatatgcatgaattatgtaaatgtaaatacattcaaaaggcaaataagtagaatgaatggtgataaaagcaccataattaagtcaacaagaaagatcttaattgtcatcgctaaataagaccaataagtaacatgtcccaagacaataacttggattagataacaggggccagcataggctacggcgctatgccactcgccctgtttccagccaataacttggagtcttggaactgatagggtgatatgaaatgtattacttgtgtagttgtactcagtgattgtgtcagatcatatcataggaattgagatgtgacagtgaaaaggtcaaaaccaaagcccatgctaataataattatcaagtgtcaaatattgatagagaaaaaaaatagagaaatcagatccaaaaggcttacaccaatatcatgagacccattctcaaatctcacaatgaaaacgctcactttaaaatgactaaagccttcatccaaatataccctaagttttccagaattggtatatgtattgccaaatgctttctttagctagcatattcagcccatgcaaatgcaatacacccagtgctcacaaacttaaaatgttcacaacacacatgaccacaactaaaatttaaaacactcacacacacacacacacacacacaagcataccctaaggtttctcggcttggtacaagaattgccgaatgctttcgttacttggaatattcagcctatgcaaagcacccaattctcacaaacacaaacacaactacaatttcaaaccctgatacatgtacacacttatgtactcaacttctgcaaccaaacttatatgcatatacacaccactgataccaaaagtctaaagtgtcagtgaatttggtactcgatttataaaaaaaaaactgtaaatttagtccctaattaattatttatgaaaatagaaaaaaacaccaaaaatcgagacgaaatccacatgaattttaaagtttgagagccaaattcctcaatatgaaagtacaggaaacttaacattgtttgaccggaactatatggattaaaaaacacatttttttttcctttaaagttaagtcagtctccatcagtgtttctcacaactgaactaacaatgctgcaccctctgtgtttaagtgaaggaaacaaaagacaatgtgagaaacctgagacgaagatgaggctgcaattgagcgcaatgagtgctctgagacggtgaaagagtcctctgagatagactttctccttgacgcaggcgtgcgacttgctcacgctgtgaagctgcaccatccagcacgacaggtccacgcacaccctcttgttcctgaccaacgaaacaacacaaaacaaagacccgcgtcaattcactcaacaccgtttcgaaggaagaaaaaaaaaacatagttttggggaaatggaaggtaactgtaggtggtgaaggggaaccgttttcttgcacgattcgaggacgtcccacagattcttcacgcccattggaatggagattgagacgttgctgatgagaccaagattcttccggcgagagggaaaagcaaaggtagagtttttaaaattcgaaacgcgaactcaagttccgcgttaagcgacaaagttttcagatttatgctgcgagtgcaagattttttttgctgaataaaaaaagatatcttttgctggacttagaaattacctatgaagtttggatgtaccttattttaagaaatataacaattggtataaggtagacaaattatttttagttttgattgtgatcttcttttgaaattattgaagaattttattcaatctcacaataccaatctctaagtctagaactaaaaaaaatgttatactgattattgtcttgtgacatgttttgattagatatcattttcatgaaagatgaaatattaaaaagaaatattaattatcacatatcaattatgatacatgaaattcacattcatcatccaattaaaacacgtgataagtgaacattgatttgatcaatgctttcttaagctagcatattaagcccatgcaaatacaatacacttcatgttcacaaacttaaaatgttcacaacacacatgaatataactaaaatcgaaatgagagataaattagggatcgaagttaaagttaaaaagtaataatgattttgaataatcgaaaggcaaaaatatctaaaataaagatgaaattaatagattatttcctttataattatagaaggttatagattttaaaagaacttaattttttaaaatactcacaatgagttgaagacaacattttttcaactctcccttatctctctctgacacacaccagcacgcaaacactgaaccacacacagtgtgcagcagcagcagcaacaagagaaggagaagatggctttgcaactatgggagacactgaaggaggccatagaagcgtacacggggctctctccgaacaccttcttcaccctgctggccctcatcctggccctctactacgtcgtttcgggcctcttcccctcctcctccgaccaccgccacaacaccgcctcgcgtgacttcgagcctcagatggagcctctgcgaccccctgttcaaatcggcgaggtcaccgaggaagaactcaaggcctacgacggctccgatcccgagaagcctctcctcatggccatcaagggccagatctatgatgtttcccagagcaggtatagccattcatgataactttaatagcacaacacaacaccccttttttagtttttgatttctgagtgttgccctttttgtttcttgtggttctgggttctgggttttcgtttgtttggtactgtaataacactatctcagcattacacaagaccccttttgttgtttttgatttttacccttttttgttttttgcggttttgggttctgggttctgggttttcgtttgtttggtataatgatgaatataattacactacctcagcataacacaagaccccttttgatgtttttgatttttgttttttatcctttttgttttctgtgatttagaggtcttggtttcgtttgtttggtcaacggagctttttgagttttttttatccctgaaatgagcatttcatgaatgggcgaaacttagttgcagttccatagatgtttttggtgttgttttctagtcaaaattagagttttattttgttgattcatgtagtaaagacttgaattacttttctaacatacattatcgaggtgaaacttcaattccgattagagaacaacactaagataaattaagaaactgcatgtttgttggacaaatgtgtttcaagggttttctttcttttttttcattgggttacttttgttgaaaattgaaccccctttcttttggtatgctttaggcgtatgtattttgtgcccatttgtggattgggttcttgattttgtttttgtttcatggtgaggagaggatgcaatcctactcatgtgttagtaagtgtttttgggtatgcttggtgggagtggaaaatgggaaggaaggtgggaattggaggagtgaagatagtgaatgtgtatggagttgttcaatgttgtactattgaattacgttgttactttttaggcctccatttttcaactcttggtcgacacttctgctagcctagcctctgggtctgcattgattaggtggaaaagtgggttgtaggaaaaggaattgctgactgaaaatgacatttaaccaaagttttggccttgagagaaagttaattcgtattattttcctccttttatcaactgaaagtcaagtatgcattaagtataaagtgacgttcatttcaaattttcttccttccaactttatgctagtccaccaggcaccaggtaagggttaagtttatattcatggaaagggatgcaattgagtgaaaaagaattgaatgctactaggctacattcattggattatttaaagtgtgatggaatgcattctgttccatttaatccagtatccctccgtttctttcctttcaatttgggaaatataggattataataatcttattttaattccactgtttttgttccactgtagaaatgtccgaatgatatattggtaactttatcctatgctgttccttccaattccatttcattccactcaccattcaagtcaaaaattgtttttattttgttgaaaagactgtcctttttttgtatgctgtgtgtactttccaatgtctctaactgtagttttcatgcattttaaagagagtttgatgaaatatagtatcaatatgttcctcagttttaaatgggctgaaagattgattgaggtgctatgtcagggtatttctcacttcagtgttctttctgccactagaaataatgaaagtgtgcttattactttttttagtttcacctggaaagactaccttgtcaagttatgaacttgagaattcctggttaatccaaatctaagttgtccaataagctaagatttttgtaccattttcttgacagtattaaaccatgcaagtttgtgattgatgggttggtgggtgtgacaaggaagggaaaacaaatgcatcttatttgttatgtaggttggtaatgggcagttgtgcattgtttgtcaatttagagttttatttaattctgattacacaagttatccttaagttgcttgctttgtttttgctgctttattcagtctgttctagttaccatagaaaagtctcaagtcgttagtatgaaattgtctccttaacaaccgttacctctttggcattttctttctacatgaaactctaattttctttttctactcaaaaccatcacaattgaaccaattacatcatcttaaacctggtttcacttaaattttaccaaccaaaatatcaaacataactcagaataaaagttagaaatttccctcttcaaaccccaatctcacaacttccttcaaattttatcaagttttcactaaatttctaacatgagtttttaaaagtatttcatgtttcaatttcatcatatatcccttactatttgaatagaaaatatgattttgagggttttaggtatgagaatattgatgagagggaccagatttgttaaatttaaaaacagagggacttgagttgcttgaagaaaacttgggagactaaaattgcttttaacatgcataattttctagtgagaactactaaggttataattgtagaacgtagatgtgagaatcatcagaaaacccacagcatacctgattttcttgctagttgagcaagtattatattgatttttcttttgatttctacttttgaatgtcaccaacaaaatatgtttttcttttccattttttcaatgtttctgtaatgtgtcctaccagaatgttttatggacctggtggaccctatgctctatttgctggcaaggatgctagcagagctttagcaaagatgtcttttgaagagaaagatctaactggagatatctctggtcttggcccatttgaggttgaggccttgcaagactgggaatacaagtttatgggcaagtatgtaaaagttggaactgtcaaaaagaccgttccagtaactgaaccagaatccactggcgaagcagcagaatctaatgtccatgatgctgaatcttcaaagcctactgaagatgatggcccatcagaatcagcagctgctaaaaatgatggaaccccttcaaagattgacgcagataaagagtaaataatcgttggataaagagcaattgtcttgcaaacagtggaaacggttatttagaagcttctgagagagactgagccttgctgattagtctaggccaccccttttgcactggaactttgtcctagtattctgtttgataaataaggaatttcgattcttagtatttaatttcagttttcctgggtttaaagcttcttctttattccataagatctatattacatacaggcaacaaatcaatgttgtatttgtatttacttttttctaaaaaaaatcaaatattttctttaaaaacaataaggtaattttaaaccataaaatgtgataaaaacttgcttacaaatattacatgtgtcaaactaaaatcactaaaataattttttaatttcaataaaataaaatcactaaaataattttttaatttcaataaaataattataacattgtgtatcatattaataataatatcattatcattgctaattacacaagtcctttttaaaagcttatcacttaacatatttaactaaaaagacttttcaaaaattttgagtatgaccttattgttaaacgagcaaagccaaggcataggcttctgaccggcggcaagaacagaaaattaacaaaaaaaattattaggatcaaaattgataaaacacaaacttacataaattaaattcatatttaagtcaaaaatcatattactagagtaactaaaaataattaatgtgaccaatgaacaagatatacacgacaaatgatgaaagacaagataaaatgatagacaaaaaaatattcatttattttcacctacgaatttaagctttggggagagttgatttttaacatgggtattagttgccaccttactctcacaaccttcaattcacacccttttaatgtcgatattatgaaaaaatatggcaataactgcaaatgtaatgcacttacgaaattatgatgttgctaccataattgcatagttgcaattcgcaagattttgtattagcctaaccaaaaaaggtccactaacactttcatcattgatgctatcattatactaaataactactaggtactctgtgatcaggatcatgtcattagatgtttttagtgagaacataatatctcgttgaacgaatgtaaagataaaccaacacataatttacgagtgaaagaggtttaatataagaaataaactttttccaaatcaaaaattgatgtaaacattaattggatgttgattttgagtaattaatgaaattactatctttgtcatattgtatgtataacatgttacaacatgcaactaagggtaacctttcaataattactccaaatcaacatccaatgtttacattgatttccaatttgctaactttctttccctcataacttaattatttattggtttttcataagatatttgtagcatcccagtttttatttctaattacataaacatattagtaattatcaaatattttactttgttttttttattaaaataaataatttgagattatgtttttggcttggaagtgagaaaatgagttttagaacatcttagaggttttatagttaaaatgtgttataagcttcttgactcttgttttgggctttaatttctgtgagctcaacttttctgatagaaggttaatttgggtttctcttgaaaacataactcttcatttcatactgttgtgtttggtgagtctattgagagtaaggatgagagattcatcacccccaaccaggtgaaggcatctttgaaaaagaatgccaaagtatacatatgatgttagcttcttcgaaacttaagagtaactgagtaaggtagcgatcaaggatataccattagtgagagatttttcttgaagtgttctgagaagacatttatggtttattgccttagtgtgagactgcattttccatggacttagtgcccatacattacccatatctataacacctcataggaggtcttccttagagctagttgaggttaagaaacaaaaaggtcatgaaagaaagggttaggattttaagagaaacttaagttaacttctatcaggaagagttaagaaactttccatgcattttaactataaaacctcttttattttctaaaactcattttctcactttccaagcccaaaatataatcccaaatgatttattttaattaaaaacacaaagtagaataatagttattgatatttatataattagaaaataatagttatgaacccctctaatctcaccccctttggatttctatttctactagacatttaagtgtggcgtcaagtgggggagtcaatgatggtgacttgctaggtttctctgccctgtatttcttgccatttggtgccactctatattgttaggcgagtagcttccatattgttttgatagggaaaatgttaaagtgtgaaagagataagatgggatgtaattgaggcagggtttgaatgagattaaagtgactaggtgagggtgtattaacttgaatcatgccatgggatatagctcttacaccttaaatctaggagaaggatggaaggtgggtgaagatgaccttccatatcctcatatagtttagatttaaaacatggtggtggtagaatctacagttgccaaagtagtttggtgttaattttacaaaaacaatttttttaatattttattatttaaaggtttaaatatatttatagtccttctaatttagtgttttttattttttatttttgtaaaatttcttttaattcttattatgtttgttttattttaaatttttaaaatattttaaataatgaaaaaaaaacattatctataacttcatgagaaaaaaaaataaaaacataatttttaaggactaaaaataaataaaaaattgtaagaagaaaaacaaaaatattaaattataagtactaaaaaaatatttaaatcttatttaaatcaaacaattgtagattggcttttgttaaatcacggtcaactttttttatcaacactacttatataacccaattttatacaaatcagaatgaatagtatggataacaaaattttcccttcaaaactcactagttaaggatagaataatccacatatgttaatccatgcgtttaggcatactcataaacttgcatgtgaaacttttttaaaaaaacccgcatgcaccatcaaatacctttttatattattctttttagaatattcattatctctagcatatttattatcactcttatttcaaataattctttattaatcaaaaacattttcaataaaaaaaaatactaacaatatatacagagaggacgtatatgagaatcatcagagatccattagattaaatttgacaactataattaaaacactcaattaaaaattcactaatgcctcacgtcacctatttttccacaattggaagcacgtaactttcctcaaaatcacaattcttgtctataaaagattgataacacaatagagtctaaccgttttgtttgtttgtttacattttcttctccttagaatacttaagaaactcgtgtcatacgatacattttttttaaaaaaatctataaaacttaaacagaataatttcatatataaaaagaaaaaagtgtgtttttttataaatggacttaaaaaattagctcctcttttccttctcaatgcatactctccctggttctctttctctctccctctctcagtttatttcttttgaattaaaataaaaaatgaaaacaatcaaacaatatacttcgacttttatttttaaaataatttctgaatacaaatgaaattgttcctaacctatttaaatctataatttctttgcacatggatgatcttttatgtggaaaagaagtgtcgtgtaaaactaatgttccttccttatatgcccctccttggatacctaacttaagctctatgctcacactaaattaatttgttcgtcccactcccagtcactgaattgatatatatacgtgttgatattgagaggttattaatcaaccaactacttcattgtttcattcaaagggtcaaaatattggatacatggagaaagatacatgtttgccagttcatgcaggcacatatgcattctaccaattgtgggttggtaggagagatttgatagctaaatcatggccacattacgggatacaaataaaaaggacatgataattaagttttaaaattgcaggatatgatgtgattatatataatataattaagctataatatatatatatatatatatatatatatatatatatatatatatatataatataaaataaagatattagtagtcacgaaaaatattattgttttgaaaagtattgtagatataataaaatcttaaaaatcacttaactattataatttttatttttcataagaataaaagttcaagaaattaattggaatgtactgttatcctaaatatctaatcatttatgttgtgatataataacttaaaataatcgacttttgtaataattcttttacaagctatgtgcatggaagctttaagagtttaattctcaaacaatgttgatgtaaaaaagtttgctgtcatccaagtaaaacttatttttacgtgaattttaagataattattacagaagtgaataaatttattatttttataaaaaaataaaaaaatatatcatacatatatcaatttgtaattgaataatattgtaaaaaatattatatatatatatatatatagattatttactaatttttaattattaatataatgtcacaatcttttcaccaaaccatgtatctaatttaaaaataaaagtagagatattgtaaaacgattaaactcaaagtttaaaattaaaagtagagatattataaattgcagttaaatatagctgaagtgttcgtgtagtgctcgacataaatacatatgtcttcaggacatgatatagctactgtttaggagcgtgtttgcttccggaattggatttggtacagtcgtatatttcatacatttgcaaacttagaaaattgtatttgttggataaagtaataaagaatattaattagattatatacattctttttaatctaacatattcttcagagttagagagtaattcctttgcatattgagatttattagagggaatgtcgtcctttcttaaccggatgttattgtttatatatagttttaaaaattaaatatctaatcagatgtttaaattattctgcattcacatataaatattcagaattaacattaagatgatgtgatgtgatatgattaaatgatagctaatattatctcttaaaatgtgatttgaagttaattagattcttagtcagttagttcatgtatgaaaaaaccagttagaagaaattagcattttaaataaatcttaatattttaagaaattgatcattaattctcacttaagaaataatcgagtcattaatttattttaataatctttcgaaaagtatgaagagttacttttctgttgggtaatcaacttttccttccttaaatgtcttggccccccttcaactgtattcgatctattatgatctgtgattcgtatccgtaaagttacacagactggttgacaaagaacaactcagaccttacagtatatctcagctataaagttggtgtggcacaagaaagcaaaactttacgaacaatgcacacattgacacataaatgtagggctactaagttgtctagatccttgcaaaataaacaccttattatgaatcaactttcttccatcgttgttttttttattatttcaggtagaacaatactagtggggccacatgaagacagtgcacttggaaagctgataatataaattagtatttttttgtgtattttaaatttaataacttttaataatatacccatttaaaaattatttagaaaatattttgaaaatgtaagatacacgcgtataattaataattaattgaaatgcaatttaatttttttataactattagtaagaagataaaatatatcaaattataaaattatgcacaattaattttaaaatgtttaaattaaaatttaaaaaatcaagaataacaggtatatataattattaactagtaaagaattaagagataaaattactctctctgtctctctctgtctctctctctctatatatatatatttcaatttgatataaaaatagatcatgctgttttaatcttttcttgcatgatatgtaatgattaagggataaataaataaaattattttattaaaaatgttaagaatattttatactaattaatatagaatgtttacatgcatgttttcaataaaaacatttttttttaaattttttaatcattactcttaggacaactaataaataaactgttgaacaatgatagttgcactcgtgtgtgtgattctttacacaaatataattcatattgagtcattcaaaaagttgtagtagccatcaatcatgtgaatctatattggtgcgtggttatttcaatttaataagataaaaaatagatatggtttaaaaagaaaagaaaaattatagtggtgtgtgagacaaataggtaagtccatgtaacatggattactcctaatcttttcagcatctgtgaccactgaccagaccatgaattattcaactagctaggccaatgtatgattgagatgtaatttggtttaatgtgtacgtcgacactctgtaccacaagttgattgatataattgattgcattgtatgtatgcactgcaaatacactaaatagcacacaccagctaaccacctactcacaagtatttaattttgagtgttattgcaaacaatgaactgatgtcttttctaaatatattattaaaccaaagttttcatcctaactttgccccttttttctcttgtcatattggaatcatgggagttcataaatctagatttctaattattatgttccttctttttatactagtaatactgctccatctttcaagctgcaggcacatttcctggggggataaggaaaagatcatggaacaaagaacaagaaccagcatccccttttcttcattcccacatagttataattctgctgaaatcaaagacaacaaggtcagtggatttcatactgtttcacatacagctactccaggtggaccaaacccacttcataactgagtgaaataaaatagctatcatcatcatcagaagtctctctagtcatagcagatccggtataattaactagaaagggtagcaatttctttgaagcaagacatagtttaatttcatgttccttaattacctttgcagaatccaaaatggtgctttagttagtttgcatcataaaggtatatatgtcatttcctttgatatatatatatatatttgtacttatgaggatcatctgacatctggcatagtatggtgaaggataaggaaacttgtaataatgtaattgtccataatctatgttgattatctcactagcaataacgttcttgttaatatgttcatttttcatctgtatcttgtcaaatccttactgcagaagatccaaactagtaaaactgggtgtttagttacgcatcagtaagctttagaggcgcatacatatataccttgaaagctccgtgaagtagcttttgcgtctttttgaatatttgatgcgaccaaacacgtacaaagttatgttagtaaatcagattaatttccgtttacttttagtgtaaaaaattatatatatatatatatgataatttagaattggataataatgtaaaaatcctttattgcatatatatacactattttctcttagtttaatttatatatttcgccttaatttttttaatgccttttctgcttgaaactatgcaagctaaaatctcattagaatcggtctagttgtggaaagttgaggcaatttgtacaaggtcctagctagatttaaagcttgttgctgtaaagaagaaaaaaaaatgcaagctaaatgaatactaagtaaatgtgtgtcctgaagcacgaggatgatcatcagtttaacccaaaagtttaagatcataagttaagacaaaattctgtcaaaaaaaaaaagttgaagacaaaatgtgcatattctacccatgacttcatcttatattgtaccgacccattaacctttttctttgcacatgtacacctttcatatattcacacaaaaatgctcctctaaacgcgaattgaacattaatttcttaagtacttatcgtttccttatatatctgattcatcctctgatataaatcatcatcatcttgcatggttaatttgctaatagattattcaaaaactaaaataaaataaatgagttaaaaggacatgtagtcgcaagcatgaccttatttctttggcgtacattccttttaactcatttgttttattgaataattcattcacaaatatttattgacaaggaaaaatttccaccaaattaatccagatgaaaacagtaattaagtatagagggaaaaccggacaaatatataaaaatctacagatgcagataagttctgtaaggatctttaaaaataaattaaggaaagcaacgttgggcttaattagtcaatctatgttatgggtatcatacaccatattcctctccaaattttgtataagtgatcagaaaagtttgttatccatcatagacagtgtaccctaaatttggcatatacgtttttaggcctggtaaaatagaaactattctgaatcgaagagcttcgcgtctcgattctcagtcaaagcttcacaaatttatagcgaacatgtgtgctttgcgtttcgaagaatcaaggttttcttagtattattttagtcagataaaaattgagtaatctatattttaggttttagtttgattaaaatttgcttagcataattagcgaccttagacttcagaaattcctatttctattatagtttgttacgttagtccaaaggtgaatgtccatttagtgatgtcgttccctactagaattaggaattttgaaatttaaaaagtttcagtttaatattttgtaatgccactattagatcaaattagtccttttggtcaattttgatgtgaaaggattaaattgatggatgtaaggaagactttaaagtaataaaatataaacgaccaaaatcgaaacatacaatgaaaacaaggcatcaaaaattctattttaacctaatatttgttaaaatttgatgatgatccactaacaatgtaaaacaaattaattggaaatacgcttaaaataattttattctgacatttaattacaaattaaagtataaattttacaataattttataaaaattaataaacttattatatctaatgatttataagataaaagtataaaattgttttacacaactagtagaggctcttcttccaatttatattaatgtttgatttaatattaataatcaattagttgttggttaaaaaaacaattaattagttattttaatatttatgtttataatttaaaacattgacaatttactagtatatttaaatttgattttaattaaaaatattaatttaaaacaacttattttgtgcatgaaaacgaatacaactaccaactgatcactactccatatctaccttcccgtcttaaatttcagccatcatcacagtgcaattcaaagcgtaaaaccctacagcaggaagtgatggcgcccaaacacaaacccaaatcagtctactttgaaccgagttctgtagtggaagtcagaatcaacgatgatggattccgtggctcaggcttttccggcactatcttccgctttgtcgccgcaaaaagttcatggtcgagtacaataacctgatcattgaatgaagttatcagtcttcaacagctccggccactgcctctgctggaaagccgttagggtttctcttgcttgtgcctggactgtgaggaccatgttcaggtttagggatatggaaggtttgacgtgtgtttcagagatcgaccattgtcttttcgaagcagcagctccgagtccaccgtgagtgaatcaatcacaaattaaccatgaggtatttcagatgctcacttaataaataatatctatatgatatgaagcaagtatatttgtgtaattttttggatcagttatcggtgagggcaaaagaaacggaggaagagatggtggtgaaaatgaatagacagaggcgaagtagaattttatggacacaaaagaagctatatattcggacttgtgtcttgtctaagcgatcgatggaagcatctttgcaaatgtctcactaatctaacattcaattaatcatgcgggtttgaaatttttgacagatttgtatcttgggttctgtgcagtcgatgagatgactcctattccctgcttgatattaatcttacttgtctatggagttggatagacgcaaagtgattgataggttcgttaaatgtgtgtttggtttgattttggagaatcgattctgaagtttagaatttgattgtagataaacttttatgttttatttcttactgaaaaactgaaaattcataatgaaaatgatgttagaataaaaaaagtaagcgacgcaatgtttctatatataaaaaaaaaaaagtaagctaagcagtgaatatttgatcacgggactctgttcttgttttatttatcattgatgctcaaacctgtacgtggacattcaagtgggcttgtatgatgaaatcaaaggcaactgtgaatgtagttcatataagaaaggggactatggttcaataattgttgcaagtagagtttattatttcacagttggatgcaatgaaacaaattatagtcgagtagtatatcatgcatgtagtttgaaaatgtagcttagtttcctgtagattgtagaagcttgggttacctcccgttaatgccataacaaacaaactagtcactgatgtggcaacttactggctactgatgtgactatactacatcgtcccttaatggatacttcacgtagggacaaaaatgtcaatggataaacagttcaagaacaaagatcgatctattgcttaaaattttgattagggactagaaaaaatctgcaaaatataagagcaaaagatattaaatctgaattatatcaatattcatagctatattgtgatgttgatatattttttaaatatctattacgtgcatatctatagtttatacttatataatttttttggtaatgatacttatataaattttacacaagtgattgagaaatacattaaatttttttataaattttaaattcaacacccgtggaactcacgacttattatgctagttaaggtatttatatgactagctagttgcctaattacaataaatttggaacaaatagccaattattcttttcatttattgttctaatccatcaaagaatctgttaattttttctatttgttcttttcatttattgtgtattagaatactagttaagggtatttgtatgaccaactatttttttgaaggagacctactacttaattacaatagatttggagcaaatgatcaattatttttttatcatttattgttgcaaactgactaagaatctgttatatcttttcatttattttttccactcaatgtgtattagaatttgaattttaacatttatataactatttatgaatatatctctcttcaaaaaaaattatgaatataactagttatataacaagttatcaaattaattggatattaaataattagtcccgaatacatttgattaaacaaagaaaagctagttatataatcagctgatagataaataaaaataagttattttaaataatcatttttataaaattaattataattttataactatttttatatgactatagttattattagctacagtttttttaattagtttttttagcagctctgacaattagtattaaacctactccaatggcttaaagcgtatttttaaattttaaattgaagcttgtaatctgtaaaaaaaaaatgaagcatgtaaaaatacatattaatagataatagtattattttaactatatatagaataaaaaatcaaataattgaactatgatacataaaatttattgatgtttgatttattaataaaataataatttttttaacacttatgtttataatttaaaacataaagaatttacttatatattgaaatttgattttgtttaaaaatattgaattaaaacttataatctctgatcattgatcatacagaaaacagaattacccttcgccgttgttctttgtacaatggtgcacaagtcctctgcatatctaattctaccatttctagtttggaaatacaaagtatgactactaaaacacaagcttacagtattgcactttatacttcaaatctttgttctttcactattgggggtcctcttagtctcgagctctcttccacgtgcaatctttctcttcttgaacaagtggatatttgcatgtttattatgaaaagttcaatcaacgtaagatggctgtaggtaggggcttgccagtgtaaaaatattggcattgccttcaaatactcttctaatattactagatgtaagttactttagttagtatgcatgcttttgccttttttctttttcttaatgctcataacatgtctgcattcatgtgtcaaggtttttgcagatagtcttgcatttcaaaatatctattttaatatgtatccaattcactctaattctgtaggatctctcaaatcccagttcagtgagactccaacccccatgatgctttgttagattcgagtcattgaaagcgaaaaggctactcggcgtaaaaatatctgatgagcaagtatttgcttcaaaactctccattagctctagctaggggagtctatcatagcaagtgatgttcatccttaaatctttagttagagatttttacgtattatctagctttttcttattttatgctttcttttcttccaatcctaaacactctcttcttactgaaaattataggttgtaatgttgtaagtgacttgtttataaggcctgttacagattttttattttttattttgtgtgtgtgtggcattaaccaatgaaaaattttaaattttagaaacagccactgttgagaacaatttgtctgaaacatacagacctttttattcctttgttgtttgaaaagtatagtaagcaaaatattatgtttaccacagaactgggactgcattaggaagcaaattttgaagaatccttgaagataaatccttgtagaatgaaacagctgaagtaaaaaagctacgtaacgaagtgaacattttgaagtgactttttttgttaccattaactgcattgtcgttgtcaaatataaattcatgaaagtggatccattctatgctagaaaaattaatacttcatataggacagtaacaaattaatgtgtactggtggtggcagctgaaaatggcagtgtgtaacagccgtaactttaataactaaataagaaaataataaattaataaattaatacataaataaataagaaaaaataaaataaaaattattaggtcataaattctcactatataagccaaatgttaacctagagcagctttttgggaaacacattctgttcctttcttcttttctgacgcacaagaaccctaacagagcaatcagaggaggagctctagagagcaccagagacgccaccattgctaacagagaacatttaagcgactacctcgaggtaagggatgagttactcacgcttggggattagaatgaacatgtgtagggatccctagaggatcaatttttgggttattttggggtgtttatgaatttaattatgttttcatgtttaatcacggattgaatgtgtttgatgaaccaattggtgttctgttgcgagtttgttgtagaattgatgtgttctgttgcgagtttgttgtagaattgatgtgttctgttgcgagtttgttgtaggattgatgtgtttctgtgttaggtgtgtaccttaggaattagaattctttataattagcataaaaattgtgtggtggtgattttgtttataccatatatgttggcctttcaatcttgttcctgtgctaatgtacattgtgtccagataattatttttacaccgcagtgtatacgtgtacatatatattgatactgttttttttacaaactttatattttattttacgtgggtgatttcttgtcatgaaattcataggtgtagggattgttggataattgaattggctaaaatcatttaaagaaattaactaaagttgtattcacattataattaggcattttcttgatgttggcaacttagttgaaatatatttaaaatataggtatacacgttgttcatagaaatcaatatgagtatatattttattgttatatataatttgtatttacttaataatatatttgatattattgtgattactttatattaatatatatttaatactttttatatgttatatataatatgtacgttacgtttacgttaatatatattttgttatatattttgaatataatatacttatatatattttacgtgtattttatagttacttgtttataagccttgaagttaaatattatatgttattaatattatgatacattgttatctaattgttgagtatattttgtaattagttagagtgtgaaatgttaaactgtagacatgaaacatggttgtgaatgagtgtgtgattgatatttgtagtgatattacttgtcatgtgagttatgagttatacagtaacccgaccagtgtgtaccttgagagaacttttatgcgcagtgttaaagaaaattgtaggattcctagttaggatcctgaagggttaaactatagcgcaatttgttaaatatgtttgaaatataagagtaaggtcgtgggtattatataactcataaacagtgtctgcgtgcaaataaaaaaaatattttaggggttggacctgaatcaggaaggtgaggcccaaacggaatcttcggagtctaggccttgggggtaaagatactcggtttgagtgctcctttaagcccatgttgatcccatgtggttggggcattctcgcaaaacagagtaaccctgactggtcaccttatgatgttacttagtgagagtgaccgagtatactcattgtgtggtgtgctttgtcatgtactcctaagcgccccagtgttgtttttcactgacatggtaccacattgcatataggcttgagtcttagtataattgttgcataacgcttgtgtttgaatttcattgagttaacaattgtggttgatgttattttatggagtgtgtaaacttgaatgggtgtgaataatgtgtgcgattttgtgcagtaatgttatttatataaattcagctttaagtattatatgtttcacatgctctaatgttttattatatacgaatgtgataactcactcccggtgtgtgtttgcgtttgggctgattgccactttgtttcaggtgagccttcatatgatgagtcacatgctagagatggagagacttagtctgtgatagggattatgatttactgaatgatataattgtgttatacttttctactttagatttttttattattatttatttagagtggacggccttgttttgagccgggataatcttatcttttattaaaaaaaagtaatattctattatgttttcactaagtggatgtgaacctttatccttttgaattgattaaattaaatgtgtttaaaaagaaaaattattaattaattttgcatgtttttttttccttcttttattattatgtgtttataatcttttaattaaattttgtatgatttatttaattagttagttataattgtaagggtagagggtgtcacacagtgagattttaatggatcaatgcaaaagctcaattctaagaaaatttacacaaggggaagcgaatgattaaacttagttgaaattatagatacaataacaacaaataagagtcaatccattatgaaaaaaaagaatcaaattaaaccatttaaaataatttaaagattagattgattcgtttttaaaaacttgatgatgaaattgaactttttaaaaatttagaaaccaaattaaatcatttaagccaatagaattcatcatttgaggggaaagagaagtttgggaagaaggagagcgtctagaaggaaacaattctcattatttgcctgatcttttcctcctctttatgccataaattcagctattcaatttggagccatcttctcaacccatatattacatgatatagttttcaattttcaactatattgatcgagtgtctttgtgttggagcttttttatcagagttatccacttcaatttagcttgtaaaaaatgagatccatttgctttttaggatgattaagaagtactaaacaaatatgtggagtgatctgttttataacataacttgaaggatcttccctcctaccattttctggctgagatattattggatcaatgcagaagctcgattctaagaaaatctacgcaaggggaaatgtattaatttatactttgttgaactgatagatatgcaataacaacaaataatactcgatccattatgaaaagaaagaatcaatgaaaaaggaggagaaagaaattcattagaggggaaagagaagttcaagaagaaggagatcgtccaaagggaaataattctctttaattgccttgtcttttttcctccttctctatatgccataaatcctactgttcaattgggatccaccttttttgaaagacttaaaattgggagccatctctctcatcccacatgtatgataattttaacttttcacagtgtcctacagctatatgttcttaagcatggctctgtgggtgaattggtggtcaaactgaagagacagacacaaagtagaagaaataggacaggcaagaggggcatgatgagcgaggtgcctgacaatgttctgctctacataatgagtttcatgagtacaagagatgctgttctaacttctgttttgtctaaccgagggaaagacctttccaaacgtctcactgatataacattactttgaatcgtctgtgatagtacttccaaaatatttgcacttgcctgtagtaaaaagtctgcatctagaatgggatatgttcactttataatgatgatggtgacaacactgagccatttttgtgtggggaatttcgaggagagaaaacactaagaagatttacatcagtgaaatcatgagcaactatgaacttgacatcacactttaactcaaaatataagactcaagtttatgggtattcttctcacttatatgatactcaactttttcatttttatccgaagtgtgacttcacctcacacttgtaacctaacatttggaactgtcacatgttaaatacattgtaccttggagagtagtgttcttggcgaaatggtggtgaaaaggtcctccgcatatgtaattctgctctttcaagtttggaaatatacagctatggcatatttaattgtgatctatttcattcttacaaaattgcactttctactccaaatcttaattctttcaccgtcgagggttctgctcgtcaccagctctctgtggcgtgtaatctttctcttcttggaccagttagtatttgcatgcttttggcgacaagatcaatcgtcataagatggctgcaagggcttgccaatgtaaagatgttgacattgacttcggttacccttaaagcaatactagaatatgtaagtcactttagtattgttttgcctctttatttttcttaattctcgttacatgtctgcattcatatgtcaaaattggtgccagtactcagtcctgcatttcaaaatatatgttttaatttgtatctaattttctctaattgtgtaggatttcttagatccaagttcagaaggacttcaacccccatgctttgttaatttggagtcattgaaaataaaacgcaaaatagattaactgtctagtggacaaataaacagagcagtctagtggttgctttaaaactctcctagggccagagttgatatcataattgattaaagtgatatccatccttaactctacatttcaagaattttatatattattcatcttttgcttatttcatgcttccctttctcccagtgctagatgctctcttcttacagtaaattataggttacaatattgtaagaaccttgtttataaggcctgttacagttttttttattcttattattgggctttaaacaatgaagcaaaatattctgtttacagcgaaactgttagaaagctaattttgttccagttattttcaaatcatcacaatttcttttttagcgacaatcagtttgagatgccattgaagttttttacatcatatttaataaaataatctagacatcttgaagaatgaaacaattaaagcaaaaagggtaggtacaaagtgaagattcctaagtgactgttattgttaatcttcaattcatgcaagaggatcaggaacaaatctgtgtgtaccggtggcagctgaaaatggaagtgaggttttaattaatggatgaatgcaaaatctccattctaagaaaatacacacaagggggaaagctattaacttcagatagaactaatgaaagaaggagaaatacaattaggggaaagagaagttcaggaagaatattgtccagagggaaataattctcagtattttcctcctctttacgctgcatatcctattattgaatttgaagccatctttctcagcccacgtatgagaaaaaaattatacttcatatacacagtaacaaatcaaaatgtacttattcaccaaaaataaaatcaatgtgtattggaggcagctgaaaatgacagagagattttaatggctcatcaattctaacaaaatgtactgcatgcaatcaatgtagctgcagtttaacacatatgagatccatttgcttttcaggatgattaaaaaaagtactaaacgaatatgttgagtaacccttttataatataacttgaaagattttcccaacatatctatcactctagtaggagaagaaagcataggttgcggtggcataatttccaaaaatttcatgctgcctttcaacatgtctatcactctactaattgtaggtttaccgtttggaaacatttgaatgcgccacaaacccactatggtcattctctttgctttcattttcttaattatgtgggatcatcacctcttctggtcttatatcattgcctaactcaagcctctagtaaaccaaatgcgggaagtacatctcacttagcttgtggttggcttcagcttcaatattcttcctccctcctaccatttctagcaaatcatcccatagctaaaaacaatattacacttccaatgaaaccaagatgtctattgaacatttctggagctacaatcatcctctatgtatctgacatggaaatgattctctctttcctggcatagagcattttaggcccaaaatcttatatttttgtgcaaaagttctcattcagaagaatattactagtttttatgtcaaagtgtaaaatttgggagctgcatcccctatacaagtactccaaccctaaaactttctagcccactttgtagatcataaactgttccagggaaccattagccataaactcatagatgggagctttcttgtcatcctttcaaaaaaataaaaatccacgacgtgcaacctcattattgatcataaattcttcaccgttccatttggatgcgttcatgatcaataattttattttaataaatctgacatttcaataaatcctctaaattttattttaatgaaagaaatttaaaattgtattataattgaactaaataacacttgggtcacaaacataaccattatatggttgaaccgatgtgatcaagtatttcgtttcaacatatatttatgacacttgtcaaacaaaacaatataattcctattcctttgttggggtcatgaacaaaaaaatttattgaaaaaggaaaattaaggagtaagcctctattttgcttcttgaaaattcaaaggtcaattattttaatctctaattttataaaaaaaaaacatttattttagtttttaaaatttataaaaaaaaaagttattcatttatagttgttttttactgttattctgagcagaagtgtaaaacccaaaattaatgtccttttataaaattaataactaaaataaaaatatataaccaataactaaatcatcagtatttacaatgttaaaaatttagacccggagcttctgaaaaagcaacttaacataaagataaaaatggcataagcccaaatattgaagtgccaaaaagcgtttgtgattgtgactttggaaattgggcacgtaggcaaacttagttgcaagcagtgggggcaaataggtcttttactctaagttctttgacattttgttcaacaaagtactgttcaataatgtacgggcgaaggaagtgaagaaggaaattgcacagttttcaacttcaaatccaaccaaaagaccaaaaaagaaaagcagagatgggagccaagtgaaagacaagagatcttgagtggtgtacggaaaaagcagacacagaaacacaaaataaatgtaagatggatctattcatagattacacaaggacatgtgaaagtaaatctaaacatattgctattattaaatgttgtttttttatgacatctttcggtagggtgacaatgactaatattttttaggtaagaaaatatgttaattaatgtacatacacctaggaaccaaatctcttatcgtatatttaagaagcatgattaaccataaattatattattaatttttgaaaataaattatacatttcacaagtcatttggcatataagacaattatgacataaaaagttgtgtatattttaatatgtgatatggtcaacttacttcggaataattggatttgtaagtaatcaatctctcttggaagaccacctaactactaaattcattattattgttatgaaataagaatctcattaaacgatgacctaataacccttaattagtgacatccttgacaaaagtcacacccaataatcaagttgagatccttctagtcttacaataaccccctcctctctcttttatatataggaagacaatctaattgcaaagatcatgttcatacatactaggagtttctcttaaactagaacattaagttatgatctcggaaaaaaaaaactgtaagaactctaatattttataaaatctaaaatataatcaaattaaaacttaaaaaacataaaatgtaagacaacaaagaacttacagggaaatgagaaaactgaaaaggggcataatttaaaacatatccaaaataaattttaatttgttaatatataatccaatattaaatgaaaatattcaatatctttgttaatatacaaaaataataatattcttttatttaataggtaaaataattataaaatacatttaaacttcattgtattttaaaagtaatcatttcaataaactattttaagtaaaatgtagttattttaaataaaaaataaattttaaaacacgttaagaacaacgtttaataatcaatgcattggtagtctaaaagtttttacattattaattaaaaataatttttaatatataaataattattataaaaattaataaacacttattattataacagtattaagaatatcaaatctctaaaaatcaaatgatttaaaattattattccttaaaaaatgagagagattccgattcggtgacctttgcgtacataaaaaagaagaaaaaaaaacaatatatatatatatatatatatatatatagagagagagagagagagagagagagagagagagagagagaattggaagagagagagagagtgtatctgtcttgcatttgcaccacgtggtcatgcaatgcaagttttgtttttatttttattttttctgacttgtggaaggaaggtactaagctagtggctagtggctagtgagtggccttcactgtgttcttcacaaacaaagagaaagaaccacaaacacattctcttaggctcttttttttattctccggccaccggagactcgccggaggaatggaggagccgaactccgattgctggctgccaccaggttggactgtggaagtgagggtgagaaagaatggtaagagagacaaggtaattaagttttgacttttgacccaccaaaaatcatcttgctttttcttctggggttgtagtaaatttgcgatcttgttcctcttacacttgacaatcttgctgtggtagtggcatgatttttctcatgtaaatatattgtaagtgtaacctctattgttgcttaaggtgtcagagaatttcaaaggagggtttggactttggaggttcaagattttgttttcacttttggatatgttacttgcttggcatttgatatttaatctatgttttgcatgttctttttggaccctttggagtttggactgtgtctctgtcagcaaattcctgttattagtgtgcttttaattttgtgattttgtaagtggatcaagaggaaaggaatcataaatgttggaagagatttttaggtcttatgtttctttgaatagttgggattggtgtcctgttagcatgaattgcatgtgtgtggtgaatatagcatgtctttacaacagtgaaactgactaaaagctgagtgaagcttggctcaatatgtcattatgtaagtgcttcttcaagaagcatggtgagggaaagtgttgatttttctctgatttggtagattagtgaatgatgtagaagtttttttaactctgggaagaatgaaactagacactgtgaaatggaaaggtaagaataggaaggtgtttctactagaccttgccgttctaaacggtttaacattacttattattattggcgtgttgaattggaagctcttaaaatttcaattgaaaatcttttgttcccttttctagaggccacagcaggtcaagtgagagtgagagtcatctttctgctttccctcctattatagtaatgtatccgaacaagtgattgaaggaaaaaaggaataagcatctccacgagctaaaagtatcttatgcataagttaggagtttatccaatcaggccctgaatgctttgatatttatctttcagtacattccttacattcattcggtcgaaacaaaaagtataagaaattcattcattgtgattttattagtataatctagattaccaccctttattgctgttgaatattggcactagtgaattctactatgaaattgatgggatcatgaaaagtgggtgatcaattattagtggttgattctgagttaaattatctaccttagtttattcttaatgattccatctgtgtttgatttgatttgaaattaaaatacatatatttccgctttagcatcttttacctgctaatggttgttggttaaatcattatgttcaagattttatcttgctttgactccaatcattgcttggcggtaactttatgcttgactggccaaagaggacacaatagtcatagaaactctatctatgatgatgtagctcaaatcttattcaagttatatttgttgcagtattacttccccccctcaagtggactaaaattcaattccaaggtggaggtatttcgctatcttgacaatgctcagaacaaagtcagcatccagaaaatctctcctaatgtctgtcaagaaaattcttcttttgattgcattattttatgtttaatatctatcgggttgcataacttatgtggggaaattctgttattcaagcaatctaggttatagttgagaaagctattgcggaagggttaccaccaggatgggtgaaaaagaccagaatcacaacaaatggagattcagttagaagagatacggtaaaccatgcctcaatgttttctcttgaatattgtatttgtagctacaaattcattaatggggagaaaaaattacttcctaataatcttcacagtttctcataactagcatttctatatttgtatttgttgttgattgaataaatcagcatgttggggttaactcgccactctaaggtactgattgctttattaaaactgtttgtaacttgatcttctgacctgcaaaattcaagtgtaatgtttctttcttcaatccttttacgaatgaagtcatcattgagttcagcgtgccttgttcagctgtgataaaactgtaatttcagccataaaaatgctgatttttttttcggtcaaatatattcagttttttctaaagatcgtgctgtgctttgttgcttctttgaaagtcatgagagtactttgttaggacttaagcacaagaggagagcccaacccaaaagactagtatacttctggcatcatttaaaattactctcacgaaaccctactagttttacatttcacttcgtccatattttttttcgtaatcattaatgctttggatataccttatctttccctttgctgtccaaagatgaaaatggcttggattagtcatgaatctaggcaataagaggttggtgcaaacatgataccggccttgtagctgtgagataaatcatctattaaaaacctgcctcctttccacaatcttgctttttgaattccccacccccgcccctaacattttcttattcgtcattcctatttaatgcaactcattacataattctggggtctattaatgttcattttgacttctacaaaaagcttagttcactttaactaaactttgactgcacattaaaccaaagttgtaacttttgagcacttaagagtaggaggatgcacaactttttttatcaaagttgtttgtgcctttaatgtgtcacccgctcaaccactgtaagaataatcaggtaatttgcccttctaatttgtatatgcagttctatattgaccctgtaaatggttatacattctgctcaataaaagatgttgattgctatcttgaatctggagagataggaagctacgaattcaagtcaaaagacaatgatggcactgatatggagttaaaagctgacaaatctcctgtatgggtggtcataattgtgcttcttgtagtttatgtctatttgttaattagtctcaagctaaaatttcccttctactcccccttccattcccatcacgtggctttctgtgtggctttaaattctctctgataagcaaattaaaactgaagaagggaattattattcccttaattgccactaagatttctacttatacagccttgctgtctatgatttcttcacagtcaacaagtgtaaccgtgaaaccaacattatcaattagcatgggtcaaagctcagacatggacatgatagctaatgaccaacagattccaagatctgcaagttctgaagaatatatgtctgtgcccatctctgaatgtatttccaatcagtgtaaagttcccgactttgctctttttcctttggagttaaaatacagactttgtctaattagatacatgacttaatgaaatgtattggcctttgtcggttagctttggttctcgtgtttgacaattaacatcaactgataaacattatatgcaattatgctatctcctgtaaactaagacattgtttccgctcagatatagagatttgtatttaattcaaatttaaaaataattatttgacctttgttctttctagataaaatgatatgaaataggttttgtacttattggtagcttttcctttttccttgcctatatgtagatcttgcatttgatatgtatttattatatgatctaggtgtcgtgggcgccaaactgaccagttcagttctatcactggctaaaagttcagataaaaaacaagggaaggttggtgtagctcaaagcgcttcggtttctggttgcactaacaaagatgccgaagaaaagcaacttcaagaaaattcagagacaaaacatggcactgaaaaagcccaggccaaagatccccagtgcaaaaacaagcacaagaaagagatcaatttgcctcgccgtgcttcaaagcgtcttgctggaattaaggttgatcctgttccggaacttaaaataagaaatagagcacgccgtgttgcagttaaacaatcagaggaggaggaaaccatcacaaatgtagataaatctgccaacagcttgcttgatggtctagcaaaacagaaattaaataacgaggatactgacaagactctagaagtgcaaagaagcgacaaggaaaaagaatgcttctctttttcgtctctggagaacaatgctactgtggaagagtgtgtgagagtcattgaaaatggagataaagttgatgctaagttagattacacccttgactttcccctcagagaactactaacagacccttgtattgcatttgccattcaaacactcactggagtaacattcgaagcctccaaagacttacaaactttttccgagttaaaaaacagccagcattccaaaacttctgcttctgccgccgccattggcgaaggcgatggtaagaaaagcaatgatgggttaggtggcaatgagttctcatctccagagaacctttctattccaccagaacatgctggtgatgccaaaactgatttaaaggccaagaatgagaatgcaggaccatcttctgaaaagacacttgacatgtcatcatggatggatccatgcattgaatttgctataaaaactctcactggcaccatcccatcagactctgctgatcaaaatcccaagaactgcctccaacagcaactcagctcatcaaatagccaacacagtgagatggccttgtcaagtgtcagtttagataacatatacaaaactgactactcttgcagccaatactttgacacacagaaaccaatgtttaataaacagtcttttgtggatccatcactgcagcacaccagaaatataggtattggaaattctgctggatccagactctctcactgtggtgaaagatactagaaggaatgtttgttagatcagtaaaccatcttgtgcctgaactaacataaagattgtacagttaggaaaactaaaaaagcttcccaccccatgaaacctttaacctatctccttttgttgttatgttgttctgtgatactttaattagctgatcctatgtattttgtagaacatgctatgggtggttgttagttactatcatgttagcttgattgtagaactgtgtctcttatggtgtctaatcttaagttgattgtagaatcttcccatcgtgtgacatcaaagtggtagctggttggacttggttcttagaattgcattccttaaggtatagaataagccaaaattcttatactttcactttgatgatgatgaaggcaaaaatgatacaaagttttcccacattcatgtaggtttctaaattattatttttgaattgagtctttgatcatgtaatttttttttaaaataggtttttagagttttttaatatcgctgtaaattgccattttctatctgtttttaagttgttacaaactaaccgagggacttttttttttagtttaggtattcagttttcgaagatataaaaaatttctaaatagcttagggactaattgaatagtttaattttttatttaatcatactttcatgttactgagaagatccttaccaaaaaatattactaagaagaaattttttagctgtcgcattatatatcacaatttttttcaatgatgcaagaaaacagtaggttttgtatatcaaaatctgcatcctaaatgtttttttaaatctgaaagtaaaacaaaaatagggtagggtttttataaaataaaatccaaatgtaagaagtcctaaacttctccaaataaattatgatcaactacaagtgagattttgactaaaataatatttaaaaacccatttatagaaataaaaattaaatgaattaattatttgtataggataaatttagatatgctacttgctagtagcaaatgttttcaacggtgaaaagaaatagtatactaaagaaattttatattttattttaattcaatttatttcttctctaaattaaacacatcttaaaagcagcactaaaccatgtgtcacagtgtcacttgaataagcgtgacccttaataaaaaaataaaaatgttataaatgttatcacttgtcaacatatgttgaatgtgttattccacttagagcttaaaagtgaaaaaaaaaaagttattcagagaacattgacacggaataatagatgtaacttttcatgtacatataagatacaatattaaacgcatgcttatgcacattccatttcttttctttttcttcttctgaattacattcaaattcagttatttatgtttgttttaaagttaagcgattaaaaatatcattggaataaataagtttttatcaaatttttacagaaattttttaaataaataattatatctaatgtaacttagtcatgaaaaaaaaaattcaagtcaaaatggagttcttgtgtgagtggagagataaattggaacatataaaaatcagtttgttttatgacagcaacatgtaaaaataagttaagaattcaattaagttctattattagatatagactaagttgtgaaaattaagggatcaaaacactgaataaatggatcggtgatccaatataaatctaaaataatcaaatctatttgacctaacattatttattattttaattttattttttgacaaaattaatataaatttagacttgaataaattgactcaatttgggatgactcgattggtcatgccaacaaatctacagcttgtaaaagaatttagaaggatttgaattcactttttttttcacacctttgtttgatggggttaaattagaagggtggcctaatttgttacttctactattagaatgaaaattaactagtgttttcaaattttctgtggaaacaagcaactcaccgaaaagaaaagaaaagactcttaggagcccaaatcaaattcttaaattggcaatttttctagtattatgcttcatataaagaagaaaaaaaatacttttattgtcatatcattttgttaatgactttattctattgaagttatcaaaagcaccaagaggaataagatcacacgtggaaatattttcagttttttatttactaaatttaatagaatttttaatagaaagtattcatattattattcaattaataaattatataatttttaaataattattaaatttattatactgataatttacaattaaacgataatgtaagaaaaattatgttatcaatacgtatactactatttattcttatatttttcattaatgggataagtggctctaattcacatggtatgttcattaatgggatagaagaaagtattatttaacatttttaaatatatattctttaattaattgaaattataagttaggaaagaagattattaaatacgatacgagatctaatttatttattttctggtcttttctcattataaaattattacttttttttcttcttttttcctctccattttgctccaaatagcgcgggaaaagaaagcgattttgccgcgaaagcacaaacgcaataaaattcccaattctcgcggttcagcctctgtattccgtagagagaaaaagcgagagaaaagatgcagattcgagttcgttgcaactgtggagaaggaaactgcgaggaatggggcgtcatagaactacaaggagtggtggagccacagcctggattccacgattccctcccaaaccttcaaatcggcactctctgtcgtccttcttctcaggttctccccttttccacactcaccaatcaatttatattccgcattcaattcttccaaggttttagtaatttgcgattgtaattcaaagtttccttttgactaacgaatttatgaaccaatttgactgactgataataatactaggctagaatcaccgacgctgcgtcattatagagtattccgaattcgcagttcaaaacatttctctacttttagggttctgctcactagagtagtattttataagaatattattgatatgtttctgtcagaagatatatgaaagtgtagtaattggattaattattatatttttgttattgcttgttgcttattacattttaggtttcaaattactgttacttcaaaaatgctgacttattttagattgttgtgatttttgcctatgtattatgcatgataaatatttataaatttataataattaaacatttgaaatatataaattatgttataattgaaatttataatggattaaattattaaaatagatctttgaaattttttgaatgggtccttaaattattatttttttaattgaatctctaaactaaaaaaataagttcagaggttagctttttgctgcttgaaaccgctaggaaatgagagaatttatggtggttgagctcaattacaaagaatttacattatcaattcaattaaaaaaaatagtttggaggcctattaaaaaaaattcaattagatcaagaacctacttagtaattaaatttttgtaaaaagtacatattttgaatgtataaattatattcctaatttgtaataaagagtttaaattatagtataagatgatttttaaattgaaatatatagctaattaagaagattaaatataaaaaatataaataaaaataaaagtatgatagtttgagatcgaagagaaatattttttagttattagcaaatgcagtgtgagagatgtagctccaaaaaagagaaaaatagagtaataacaatgtctaaagtgagtagtagggtccaaggtccaaattgaagatttgtcatcttaaaaaactaaagaaagtgttaccttttctttggttatgaggctatcatagtagaattagaaaaggtacggacagaatgaatgcaattatacttttatagtaattaaaaaatgatttcctaccaaaaatagtggattcaattaaaccatggactgtttgacccaagttgggtactaaatcaatggttaccaactaaaatatttcaatttttttagtttatggtaaactaataatcttttgtgttcatgacttttgttgttaggaagtctacaccttcactgttggataccatgaactgacagggtcaaaggttcccttgaagaagccaatggtggtgctcaagaaagtaaagcatcctgatggagaaagtggttgtaaggtggagctgcaagttgttggagtcattagacataagattctgttcaagaacagaccaaaggctctcatttctagtaagatttatctttcctttccttccattaaccccctctttggaatatatatttcgttttgtagaggacagttgtgaagcaacatatgacattagaaaaagtgtctcaacaacatttccaaaacttttggtgtcttcatagttagggattcttagaaacatttaggtgtcaacgtgtgtgacgtcgattattataatcccttactttaatcctagatctcatttgtttatttttagtgctaatcctcactaattgctatagtacatgttccatagtactatgagtgctattttatatccggggtacttcagaatttcttcctttcgttcagggtttaggggaaaggttattcatatttataaattcttggtccctctgcctacttttaccacttttgagaaaagagagagaaaaaggacgtgaagtgagactgttctggattttttttcttctcttaaataatagttgatgaaagggggaaatatatgaatttagtagtttaaaaaaattggaaaagattttgttagaaaaaataaaatccactttaataatctgtgtaaaaaggagcaacaccgggaagtttcaatttaatggagctagattatatgatgtagactagaatagttggaaattggaattcttccctttgaggctctttccctgtgtacatatgtccatgaataagattctgttattgcatctgagtctatcttactgtgggtctcacatggttgctgtacagcttaggttgcaacaactacaaggggtcactgccttttattggcattgctaggaaaaaccctttaattattcttacactatctatttgcacacgttactttttcttcttcttatcttgttctatttttttgaatcaagacgatcactcctaccccaaaaaaaagtgttttgcaatctttgcatcgatagtggtttcctctccacttcaatcaagcaatcccaactttgaaaaactctcaaaatttctctttacgtgcttgtttactagtatatgtccttctcatctttaatttagatgcttttccccaatcttgtcttcgagtaacccaatattcaatttctaatatatgaatagtaggtgggggcatgttgcatataactccttgaagttcatcctgaaagatcacatctttttttaattaactataaaaagcaacaatcctaacacattttatcttattgatactaagatgctcaatttaaatatctaaatgtccaatctcagtagcattctgatttattctaccttttttctaaattattgatctaaatatagacctttaacaatacttaattaaaagactgtacaatccaaaaggccgttgtcccatacgcaatagcttacacctcacaaaaagaacttggcagattcttggagtaaagtgatagcttttttggcatttctttcaatcaccattagttacacactttaattttctttcctaatcagaaaatgattcattttatgtttaatatgcaagaataagcctttataatttatttacaaggcagctttgaattagaacattcatggaaacctgccataaattagttgctaaaataataagcaagaatatagggttttcattgcgcggataatatgcaaatgcaacctcattctgccacattgaaagacctggcaaagctgccatttcaattttaaaagggtggaaagctgcggcagtttccattttggcataattagatggctaaagtaatcttcaaataaattaccttatcatatacattaaaatactctaaatttttacattttttttacatgtagtttgcatatcgtgttaggctctgtttcacatacaagtgtgtctcttgcataggtgtgaagatagtaaaggacaccaaatagtaacatattgatgctttgaatactaacaaacatagttcaggacatgtcaattttgcatttcgtatttctttttgtctcttccattttccgtgccttacatttactttgtgaaattggaggctacatgctaatgttatccttcttattttccttgcttttcaagagccacagataacatccagggaaagacaaaagcctatcatgttagggtcttctccttcaaatcaaacagcttaaaaggactcattgtcacgtcatttggtgaaaccttgttggaccagaaaactggagaaattgggaggcacacttgtcatacgttacaaaccaaaatcagccaaagtcttgacctatatttgtaatctcagcaaccacatgttatataaagcaccaataatggcaaaaagtgattgtgatttgtcattacgaggagtttgatgcgtcattatcttaatttgggttttcgtgtgaatatgcaaataacattaattaatctaaaacttatccgaatttgtcttggccacgaaacagaatattaggttctcctaatactgtatatttctttggtctcttgtgcatgatgctccccctcttggttgtggtgctttagcttgtaagagatttggtaggtctgtgttttttagccaagtaaattcagtagcaagaataaactatcaatttcatctataaagtgctattctctattagaaattatcaattgagatttcaaacttaataacattgtgtgatttatggagttggtttcacttagttggataagattttgttattattgttgtataggtattattatcttattttaagaataatttagaagagagtaattatttacaggccaaatagatggtttatttagaatatttgtcgcgaggagcagcttgtaccgttgtgcaagagtgaagcttatctttgagaaattttttaggattaaaaaccgatacggtgctcttttcagcttttacgatcatgcaaactgctttaaactttttagttttgtaatttatcgtttgaacatcattatgtcactttgatatcattcaaaaagtaaaatcaatccaaactccagtgccgcttacaagccgtgtttgtaagcaattaaattgccttcgtttctctttgataatgaaaggcactatgatatctttagccatttaaatggctttgaaatatagttgttgattttgatgagaacttaatggaggaaggtgagcataattcgtttataaaatattcataattccttgaagtgatattatattagtgtatggatcatttattcaatttgaagtgtcatacatctttagtttattttaaagataaactcacaagatactttttctttaggtttgattcttatctcaagggtaagaaggcttgatgtaacgagaaagctgttgcttcttaagtatcagttcacgagaaagcttggtcatttatttcatttttatcctcttatacaagaatgctttcttttttattttgttttgattttgaaattgaaaattttcaaataactactagttcacaattagcttcttaattcatgagaaaattaaaaatgaagctattttcaggtgaaattacacattttataacattaagaaacaccctatttaatatcctagattgatataaaagcgttcaacataatcgaattatgtcttcaatattacatgcctcgagtgcgaaaatttttcatcacagttggaaacttttacagaagtaatattttttaatttaattataattcgcttacaatttaaattttatatattatcttttgatcataataaattgcttaaaaaaatatttaagattatttctttttattgaaactataaaaacctttatatacatacaaattaaactctattatttttatgaaagaaattaaaaaatatctactaaaatcggcttaataataagaggtttacgtcttctttgtgtcagtgctatcaattaaattcataaaaaaatattagtatgaaaatcaagggggagaaaacaacatatagcaggttgtgtaaataataaaatactataaagatcagattcaactttaccaaaaacaaaaaaagtatcagattcaacgatttacaaagtccgacaaaaccaagtgcccttaaattcatatagtcaagatgataagaaaataattagactaacaatactaggtatattataaatgaataaataacacaatgtgcaaatgagccactgatcccacacactctcaccccaaaaaataagcaaaaaaaaggaaagaaagaaaacgagttgactcataagccaatagggttgaaacataacgagttgactcgatcattgagaactctactcttcttccatttcagtcctctgcttcatctctgtaacaccaaactctcacaatctcttgcaagaattgacaacgaccctttatagaaggcgcaacgcagaacgcagaccaattgttcgacgaaattcttcaaccatgttgcgccacaaatggcggcgtgcagatcacccacctcttctccaccctcttccccacgtaactctcttcgctgtcactccaacacccccccttaacactcgcggaacgttgaacagttcttccatggttcactagaatgtacctcctcacatcttcgggcaacctcaacgtgtacctctccacacccttcccttgctcctccacaagggaatgccccgtcgagttcgacctcgaaaggtttctctccgacgcaacaaccccatcaccaatattagtgatagtagaattcctaacattcgtctttgaacctaactcaacctcacaagctagctcactagacgaatgttgttcctcgcttatatatattattttggtagtatcactagttgatgtgggatctccaacacaatcctggttgatgtcattgcttggcctttgctcaacttgggtggcttctgttgttgttgtcgtcgtcgtcatgtttcccaaacttccctcctcgccatgaggagggacggttatggaaacatggcatgatgattcctggctgagattcgcgcgacaaacgggacatgtcacgtgagatgtcagccaggaatcaatgcaatgagggtggaacacgtgattgcatttgggcagcagcctaagcgagtctttgtgagtgaaatccgttagacagacggcgcattcgagcgtttggttggccttattgaggtccttgatgttggagtaaaagagcgttgggaacgtgttgaggaggtccttgttgatcccctgggagcaggagcagggtaaggtggtggtggtgatgatgatgtgagactgggcgcaacggcggaggtagactgagatgatagccatgaggaggagggcgaagatgatggcggcgacggtgatggcgacggaaggctcccagctgtggtgggtgatgtaggcgggaactggctccatggaggattgtgctttagaaaggttgaaaatgagggagaaaatgatgtgagtgaggtgaaagtggaatgcattaaattcaagcattttgttgttgggtttgtgtgagaagaatgagaggggttatatatatatatatatattgggagaatagagaaatggtttgtttttttgattgtgatgaggatttgttggcattggaggaaagtgaatggagtcaaaaagagaagtgagcattgtatttgtagcgtggagaggaaggctctctgctcttattagtggaggaaatatcatagcttcatttattttagaatatcagaaactctgctcacaatgcattttctgttgcacttgtgtttgtgttttctaagggtgaattattattagataaatagttagatttattctcaaaatgtaaagtaattacaaagggatatccgatggaaaaaatgaaaatttagttttcaaatgacaataaattagttcaatttgtaatatcattttattattaaagtgtaatatttaagaataattttgatatttagttatattttttatgattaatttgatattaaattagaagatttatggatcaatttaccattaaattaaattatttataagagtaattggtcgcacctttctaatatttaaaaattaaatttgaattttacatatcaatgtctcacatttttataaaggaatttaatttttacaatcttatgagattttatgtcataccttaatttttatgtcatacctaatccaattttatttttattaaattttcttttataaattgaaaaaataagttacataaataattagataaatcacattaattaccttatgagattttatgaaattacataaaaattcattcatttttaattattatagcaattttcattgtgatcattaaggaggataaaacttgttttttcaaatatttaatggagtatttattcattacccgtaaagttttgtttcaagtatttaagatagaagcatgattaggactcatattccacacttttttatgagactggtagttaatcccgtgctcgttttttttttttttttttcatttgctcgttcattcatcaaaataattagagggaaaaaattgcccttcttagataaaactttagtgggctttaataatatgcttgttattttggctgatgattggaacctgaaataggaagtaagaaaatgattttgcatacagaaaaaaacaaatacctgcaggaacttgaagcaactcaatctgttttttgaaagggacaaaataatgtggacaaacaatcaaatttctgcccattttattcttctttcagtgccacgaaaataaaaaatttattataaacatcataaaaagtttctctgaaaacaaaaatatttcaataattataataatcataatatataaagaaaattaacattttatattattaatataggtaaaaaagaggggtattattttatttttaaatgaagttaaactatccctttgaaatttcgaggtaggatcaaggatggttgttgtgctcggataagattattctctttagtgttttgatgggcaaaaagtagggatccatatggaattggaagtaatttgaggttgagacttaccaatacatgaaggggaagaaagctatagatgttgattttaactctatctttaatttctttaattcagataatgtgattttactttctcgagatatttttttaactaattaagttcctttattttaattgatacaataattctttaaaaaatcacgagttattccatgttggtaaatataaaacgataattcttctattataaacgatactagcaggtaattaccaactaaaacccaatgttcaacaatgaggtatatgaaaataggataggaaattggaagaagatattctattatctgagaaaatgtggatattctaatcgatgtcaatgtttggtcattgatgagaagcaccaaacaatttaataaatgaaaagcaattattgaatgatgatgccgggtgactgcttcggtaacaggtgctgtgtataaaattttgaaatagtttttttttagggtttgctgatttaaaataaaagtttcactaatatatttctgttggaaaattttttttcttaaattctgtcgaaaatattttgtaaaataaaatctaaaaatagtgaaatttcagggaaaatagaggaattaaaaataacaaataattatttaaattcatgaatgagaatgcatatagacttgcaatgttctaaaataaatgtataggcttgcaatgccaacacaacccctttctataatgtgtaaacctacaccttttctaaaagaatcgaaaaaagaacccacattttaaatttttttttcttaagggtgtcaattggtaattttgcctaacattaaggttaattaggaagttaaaataagttagtcttgatggattcatttgattatttttttacaagtagattaaaattagtttatatactttaatatttatagaaattttttgtttaacttatagaaaaaataaagtgtttaaatcaattttaacttataaaatattttatttttataaatatttttaaataaatttattcaaacttacccttatcattgttttctaagctatgtaactaattgaccaatagcattcattaaatgttcaacaacacggaggctatcataattagggctaaatacgtgatcttacgaaaacaagataattgaaaatagcaaagtggcatacataaatttatgttgtcatcgaaaatttaaggatatttttctaattgatgttgatttccaccaatttgttgttctttcacccattgttttcgtacattttaggcgtgagactattgtttggatatatcttttaattaatcttatgctatgcccatgtcacacacatgtaccgtagataaagtagcatgttgctcgagtcttgtgttgttaactcgttttaatgagaaacatcaatgaaaatgaaatccaattattgaagtgtgatgccattgccagggtaacctctatggtaataggattgtgatgtgagtgaaagcttttgctaagttttgagaatatataaagtaaaaaagtgtcaaagtaataaggtaatatttttttttcctttctatttttgcgttgtcttttactaaaaggtttacaccagctatgaaatatggcaaccaactcaaactcttttttttattctctctttttccatggacgaaggatatgatctcacgccatgatattatcctatatgttacaatatgcaacttatcttttcctaagcttgtagggacaagacataatacgttcacctgataaaagggtggtcaatttttggcttttaagggttgtgtttgattcttgtgataattaacatttacagtgaacttggatataagcttttaggaaattgtttttataatattatttttctttataatttgtaaacatgcttttaatttaaaataaaaataattttcctaaaaaaacataaacagaatgttaaagtccccctccctctctcttacattttacttcatttatccagataaaattaactgtttagatgagatatgttaatcttataattattttgtataacttttaacacgtaattaatttctaaaaaatgaatgatatactaacttgattctaaataaaatcattaataatttaaattgttccttaaatgattgctaactcaaataattaaatgaacaaattaattaaaatatttcacgttaatggtataaaaaaaattaaatttcttattttattttagcaatggaatattcttcatgtttattttatgggttctagtactgtttctctcatatattttttagtagtgaatgcattgattaaacaggtctcaatttatcttataacaatttttttcattcaatatatatcttattttctgtcactccctcaaaaaatatcttgtactcctgcactaacctagcgccacgtacatagaaagagctcgtaccttatagtacaagacacttaaaacaagacatgaacacacgttacacgtaaagtggcatgagacattggacaaggtgaacaattgtttgatataattctctcaagaaaaacattccctccatgcctaagatcttttaattaatttaagttacctaaataatttatttatttagtcagattagaattatcaactatttatattatattttaaaattattcttttcttatcttctttccacttaattatattttattaatgtttgaaaaaaataacgagtaaagataggtagaaaaaaataattaatacatttaaaaattaaattttttatataaaaaagacaaataaatttctaaaaaaactattataattaagaataaaagaaataatcaattgatccgtccaattttattgatgaatttatgatgataaagttcaagtgtacaacaaataggagatggagctaagagtctcttaattaggaaaatgttaaatgtgagttgaggtagataggggtatggaagaaaacgaaaagaaagagagaaagaaaactaaaaaagccataagtgatatggtgaaaaaaagagattttctgagtagtgtgagatggaaaagagataaaataaaataaaatcatacacttataattcctcattaattaaatttggaataatccttgatattgatgtaatttggatattaattaataatatcttctattatttaaatattatcttaattttttatcatttagatattgataatttgaacttattattttaaaaatatttaattgtaatgacaaagaaaaaggaattttatgtaattagtcaaaatgtcatcaaagtatttttgtgaaattttgagaaacaggctatgaatttttcgcattatgttggggtgctacttatctacatggctgacatgtgcaaaagtatgttaacattatagcttcaaattagttgaaagtgataaatgtgtgaacttttgaggcagggtagcattagagaaagtaaagggattaggggacttcttcataataatccttcaaaaagagattgactaggactatatttgttgaaagtttgctcatgcttttgtgatctgcgctcacttgaagatgttgatattaataattttccataacagatagtaagcactatgcagcaacgaatacaattttttacttgagtatgcatctattacctggaggaatatcgtattgctgagagtttgtgaactacaatggtttgggcatatataacatttggtagaatgaataattgttcactcatattgtataataattatgtgttcatcagattttcagggatgtaataatggaattctcaaggcacggtcaagtattggggaaccttttgtttgagttattatcagaggcacttggactcctgcctgatcatcttaaagacatggattgtgcaaagggtcacttaattttctgtcactgctatccatcatgtcgtgagcctgaactgaaaatgggaaccagaagccacacagatcctgatttcatcacaattttgtttcaagatcatgttggtggactcaaagttttggtccagaattattggattgatatgccccctattcctggagcactggttttaaacattggagatctactgcaggtaagttagatactcataatttaatctaattttgtctttgattagcatacaacctcaatgccaatttgctgcactacaaaggatgattaacacaataacatcaggtaaaagtgtatatccatgtcaccttaaactttgtacattcatatctttgtttttactttcatgtttttcttctcagttcattccactgtgcactgttggatttattctcacatgcttaactttcaagacccaaaaatttgtcaaactgatttttttaacccagatcaatggcatgacatgacagagatatttgtggctgaagtaacacttagttaaatctcttctgacttagagcataaagcaaactacttctctatgatgctgtcaatggatcccttgcataatcattttaatgtagctgttcttgttattatgttctgaatttatattttatttagggctaagcatcttgagctaatttacaatgattaataggatcgttatggatgaacaagtaagtttcaaccttatcctcataattgaagaacattactgtgagttgtgtttcaaccttatccattcaattgcagaacattactgtgagttgtgttttctgtcatttgtaattgtatttcaacaacttcatgcaaaattctaataagctacaatttaatttgcaatctaattttgatgagggggtatgggttctactcaagtcttgaagtagtttttatctttgtaatacaatattggtacaatacagtcaacggaaaaaagaaaaaaaaaaaacaacagctaaactgcataaaacactaaatgcaatgcaattataacaactaaaaaggaaaaggacaacaatgaaaaacacaaatacaagcaaaagagagctcctcaacaatgcatttactgtttcgaactccacaaaccctattaagttatgcaatatctaatgactgaaagagcttccccatgccactcccgcaagaagtccagagaccttcatattacatggatggaatatatatatatatactaatcatctggataggctagccagactaacgaaatcatagtctgtgcgtcgatcatggtccaagaatggatcgtgacatctcatgtagttctataagatattgccaaagcaatacaatgtacatcatcctatcaatgatagagtctaaaaaaaacgaagtgggcactaaaataaaatttgaaccatgtgttgaacaaatacagaatgataaaaagcatatcctggtaaaataggagaagaaaccaaactgtctgtcaattcacccaaagcccacatgcaaataaaaattggaaggaaaaatgcaaatataaataccataagtagaccagtgatattgagtcatttgaacaggattgtatctataagcaaatgggaatgggtataaaaaatttatataaatcaagaaaataaacgattgaatatttgttgccatgaatgaaccagttattcaatagtaattgaaaacaatcgcccctagttttactctttcaataagcctctagcaatcatttctcggagaattttctctgccttatcattttcatctttttcaaataaggcccgaataattatgtcaaaagttacagcatcaggcatgcaacctttgtcttccatttttgacttcaaatccagcgcttcatcaaaaaagcccgctttacaaagtctgttgatcagaacagtatacgcgtggacattcaaatgatagcctttagccaaaagacgctgaaaaatctcttttgcatcctcaagtcttccactcttgcacagcccatcaagaagtattgtgtatgagtatacatctggctgaattccctgctctttcattctcttgcataatgcaattgccctctccagatgatgatttttgcacagaccatcaataagagaattgtaagtcacaatatcaggaatcatatttttgtgcttcatttcttcaaagagactcatagcttcatccaccatttttgtcttacataacccattaatcatgttagtataacactgaacatcaggggtcactcccctttgagccatagaatagaatacatactttgcgtgttttacttcatcaaccaagaagtatccatctattagagaattataagtaaaaacatcaggcttaatacatgctttcatcattacagctaacaaaattttagcttctttcatcttaccttccttgcttaatgcatcaatcaatatgttaaaggtacaaacattggggttgatgtttttcaatttcatttcattcaacaaggaaaatgcttctttcaaatgacccatgatgcaaaagccatggatcagagtagtgtaggtgacaacatccggggaaattcccttaacaatcatttcagagtacacatcacaggcatctcctaggagtttatttttgcataagctattaattatagtattgtacattaccacatcaggtttaaccgagtgtccttccagcttcctcagtaatcttgcgacagcctttgtctctcctgttttgcacaaaccattgatcaacgtcccataactgacttggtccaactggaacccttgagccaccaactgatcgtgaaagtaaagtgcttttttaatctccccacgaaaacagaggcctttgatgagtgtgttgagggtaattgcatttggatgaaaacccctcttgaggatgttggcgaatacagaaaaagcaagagtgatgtgagcctgatggcagaaacaattgatgaggatactcagagtacaaaggtcaggtgtaatcccatttggttcgaattgtttaaaaagggagatgacagtgggataatgcttgttattgacaagggaactcagaatgttgttaaaatggaaggtgggtgggggagggcgcataagaagcatgagattgaatgaggcaacagcatgatggtgatgatggtgagagtgaggttgagaatggagggttgcagttggaattgcaattgggggataaggcggaaaaagagagaccctgaatgttctcaagaatgagaaagatggcattggtagtctaaaaggaaagagagaggctgaatgttcttaatagatgaaggatgaatctttgggacggcggcgtcgttcctgagtcctgacctactactttccacactaatatgctattcgcagcatgtgaatttccgggtgtatgtttttctaatatgtttttatgctttcaaattttgatattaactgaatttaaataataaaatgtagttgtacggaatattaatgccataattgcatatatatataaatggacaattggaccacgtggaatacaaaaacttatcttaagaaaaaatattaaagaaaatgaaaaaatctgatgaatctaattatgtcaagatttaaatattattttaattttttaaaaatatgaaaagtaatttttagaggaaaaaacattattatagaaaataaatttatttaataaactggagagaatctattaatccaaataaaaaaataaaataaaaaattgaaaggataattcaaaataaatattaatctaaattagataacattaaattattaaatattcttattgtttgtaatgtttctcacttatatatatatatatatatatatatatatatatatataatctgtcttaaacatttaaatacatgtttaatttaatcttgtgctcttaatatttgaatcttaattcagtataatgtcaattatttaacttaatattttatctctctctcaatctattatttatctctgaatctattatttataacatcttttagttatagctttactttaaatatttttcaaaacaaaaatgtcaataattaaaataataatatatcataatataaattatttatcataaatctaaaatataatttatatataaatataattatttataatattataatttttatatttagaaatatttatttgttttaacttctaaatttagttatcaattgtaaattttagttatacaaaaaaataagatttgcagtttgtttaattcagttcttacaaataaagagctaagaacttttaatttaattggaatgtgttaaaaaaaattttaaggtgttgtcaaacggagtaatagtataaaaatctttacaataatatttaaggtgctgtaaaattagaattactctaatttgtaaggacctaatgctagaattctcaaagcaaattcaaacattggctgttcgtgttattatgtcatgaatttatattttatttagggctaagcatcttgagctaatttgcaatgattaataggatagttatggatgaacaagtgagtttcaaccttatcctcataattgaagaacattactgtgagttgtgtttcaaccttatccattcaattgcagaacattactgtaagttgtgtttcctgtcatttgtaattgtatttcaacaactgcatgcaaaattctaataagctacaatttaatttgcaatctaattttgatgagcgggtatgggttctactcaagtcttgaagtagtttttatctttgtaaactttgtaatacaatattggtacaatacagtcaatggaaaaaaaaaaaaaagaacagctaaactgcataaaacactaaatgcaatgcaattataacaactaaaaaggaaaaggacaacaatgaaaaacacaaatacaagcgaaagagagctcctcaactatgcatttactgtttcgaactcaacaaaccttaagttatgcaatatctaatgactgaaagagcttcccaatgtcactcccgcaagaagtccactcccaaacccaatcagaaccactttcccgtcaaattcacccaaaaatccggagtcttgatcattatcagaggcagaaggtggaccaaatggtgaccttccattgtactcacatttgtttaataattgattcccacagaacccttgattaccctaaaatgtagcaaactacttattttgtggtattggacctgagaggttgttaaaggaaacactaaagtatgaaagaaaggttagttcctccaattgttgaggaatcttccctgataaattgttgaggaaggtccactgcttgaaggtttgaaagtttcccttattgcatagtaaggttccttgtgtggtaaaaaattaccttattggcacaagaactgtggtttatgcaggggaagtagaatgaagattccatcaggggacagagattattggagccatctttatagaaatggcattttgggcaacagatctcaggctacaaacccaactgattcagtgcaacatcatctacaattttgccagactcatgcccgagactgtgggtctattgacaatgaaattagtacattccttgcaaagtgtattgtcaggaactgacaataaaattctgacctaatcaaagccccttcctcagctcacaacactaggtagcttaaagcacaaattggttgtacagtcaacttgtgacctaatcaaagcccctggcaatggcatttattaacaagtacaaaatacaaacactcaacttgtgatctttgttagttaaacagtctgcatctaaaacagaaatagccgtgccctagcggcacattagaatttcaacatcccctaaaataaacagaaacaaattaataaacctagaactcagactgttacacctaacatggacaaactaaagtaccctggttagaagtctcatgtagttctataagtcataagatattgccaaagcaatacagtgtacatcatcctatcaacgaaagagtctgaaaaaaaaagacgaagtgggcactggcaaagctttaaaaaaaaattgaaccatgtgttgaacaaatacagaatgataaaaaacatatcctggtaaaataagagaagaaaccaaactgtctgtaaagcccacatgcaaataaaaattggaagaaaaaacacaaatataaataccataagtagactagtgaaattgagtcatttgaactggattgtatctataagcaaatgggaatgggtataaaaaatttatataaatcaagaaaataaatgattgaatatttgttgccatgaatgaaccagttattcaatagtaattgaaaacaatcgcacctagttttactctttcattaagcctctagcaatcatttctcagagaattttctctgccttatcattttcatctttttcaaataaggcccaaataattatgtcaaaagttacagcatcaggcatgcaacctttgtcttccattttttactgcaaatccagcgcttcatcaaacaagcccgctttacaaagttcattgatcatagcagtatatacctggacattcaaatgatagcctttaaccaaaagacgctgaaaaatctcttttgcaccctcaagtcttccactcttgcacagcccatcaagaagtattgtgtatgagtatacatctggctgaattccatgctctttcatttcctttaacaatgcaattgccctctctagatgatgatttttgcataatgcatcaataagagaagtataagtcacaatattaggaaacatatttttgtgtttcatttcttcaaagagactcatagcttcatctaccgtttttttcttacataacccatcaatcatgatggtataacactgaacattaggtgtcacccccatttgagccatagaatagaatacatactttgcatgttttaattcattaaccaagaagtatccatccattagagtgccataagtaacaacgtcaggcttaatacatgcttttgtcatcacagctaacacaattttagcttctttcaatcttaccttccttgcctaatgcatcaatcaatatgttaaaggtactcagcttgtagttctataagatattgccaaagcaatacaatgcacagttttcatcctatcaatgttagagtctgacaaaaacaaatgaagtgggcactggcaaagctttaaaaaaatttgttgagcacatgcagaatgataaaaaaatatcctagtaaaataagagaagaaagcaaactgacggtaaattcacccaaagctcacatgcaaatcaaacttgaaagggaaaatgcaaataaaaatatcacaagtagactagtgaagttgagtcctatgtacaggattgtatctataagcaaatgggaatgggtataaaaagtttatataatcagaaaaaatgaacggttgaatatttgttgttatgaatgaactatttattcgataataattggaaaccatcgcacctagttttacacttcctgtaggcctctagcaatcatttctcggaggattttctctgccttatcattttcatctttttcaaatagggcacaaataattgttttaaaagttatagcatcgggcatgcaacctttgccttccatctttgacttcaaatccatcgcttcaccaaacaggtcagctttacaaagcccattgatcataacattatatgtctgaacattcagatgatagcctttaaccaaaagacgctggaaaaactcctttgcattctcaagtcttccacccttgcacagtgcatcaagaagtattgtgtatgagtatacatctggctgaattccctgctctttcattttcttgcataatgcaattgccctctccagatgatgatttttgcacagaccatcaataagagaagtataagttacaatatcaggaatcatatttttgtatttcatttcttcaaagagactcatagcttcatccaccattttttccttacataacccatcaatcatggtcgtataggtccgaacattaggagtcactccgctttgggccatagagtagaatacatattttgcatttttcactttattaaggaagaagtatccatctattagagaattataagtaacaacatcaggcttaatacatgctttcatcatcacagctaacacaattttagctgctttcatcttaccttccttgcctaatgcatcgatcaatgtgttaaaggtacaaacatccgggttgatgtttttcaatttcatttcatttaacaaagaaaatgcttctttcaaatgacccatgatgcaaaagccatagacgagagcattgtaggtgacaacattcggggaaattcccttaacaatcatttcagagtacaaatcacaggcatctcctaggagtttatttttgcataagctatgaattattgtattgtacattaccacatcaggtttaaccgagtgtccttccagcttcctcagtaatcttgcgacagcctttgtctctcctgttttgcacaaaccattgatcaacgtccgataactgacttggttcaactggaacccttgagctaccacctgatcgtgaaaatacagtgcttttttaatctccccacgaaaacagaggcctttgatgagtgtgttgagggtaattgcatttggatgataacccctcttgagaatgttggccaatacagaaaaagcaaaagtgatgtgagtcagatggcagaaacagttcatgaggatgttcagagtacaaaggtcaggtgtagccccatttgattcgaattttttaaaaagggagatgacagtggggtaatgcttgttattgacaagggaactcagaatgtagttaaaatggaaggtgggagggggagggcgcataaggagcatgcgatcgaatgaggcaacagcatgatggtgatgatggtgatagtgaggttgagaatgggattgataatggagggttgcagttgcaattgggggataagaaagaagaaaatgcgaaaaaacagaaaccctgaatgttcttaaggatgagaaagatggcattggtagtgaagaaggacagagagtacagaaaatagatgaaggatgaatctttgggacatactttccacgctattcgcattatataaaggaacgaaaacttattgtcatttgctatccatcgtttatgcctactaggtatactaacaaggggctggggctaatgtttgacttcatctcttatcaagtcataaaaaatatttgatttttttatttaagtggttttttttattttttttgggtaaatttcatgatttacaaataatttgattccgttttgaatatccacactggatattaatatcccggtgcatgtttttctaatatgtttctatgctttcaaaatttgatattaactaaatttaaataataaaatgtagttgcagctgaatattaatgccataattgcatttatatatatatatatatatatatatatatatatatatatatatgtcttaaacatttaaatacatatctaacttaaccttgtgcttttaatgtttgaatcttaacttagttagtttagtatcaactatttaacttaacagtttatctctctcaatctattatttattacacctttaattataactttactttaaatatttttcaaaacaaaaatgtcaataattaaaataacaatatatcgtaacataaattatttatcataaatctaaaatattatttatatataaaaataattatgtataatattgtaatttttatatttagaaatatttatttgttgtaaattctaaatttatttatcaattgtaaattttagttatacaaaaaaataagatttgcagtttgtttaactcagttctcacaaattaagagctaagagcttttaatttaattggaatgttttaaaagaattttttagatggcaattaattatatcattaaaaatggttaaatttatgataattattttaaaaattatattatttattttttcaagttcaaaagtcatttttaaggtgttgttaaacggactaagagtataaaaatctttacaataatatttaaggtgctgtaaaattagaggtactctaatttgtaaggatctaatgctagaattctcaaagcaaattcaaacattagatcattggagagtctattgtttgaattattaaagaattcttattggagatgtctaagttgagagattatattatctgaaaaatcctttaattgtttgacacttaaatattaaataaaaggtgctctctgttattagttacaacttttttcattaaaaacaaaaattagataataaagcaaaagtattttctttatatattttttttgggggatgtcgacaaatacattgcagaaggagaaggaaccttctaaacaattaattcctgcccttaagtattattcagccaactgagaaattacgcaaataaaacaatcattatatttttacataaacaaaataatgattaacgaatgagtaatgtcattcataaatcctcaaatttcctactacacttttacaacacagtgcacaacttaatcagctccaagaacaaaatcaaagagtcaccaaactcaaactgcacaatggaaaacccttctcccttcttctctccgataaaacctcggaatccccgaacacgtggctcccacattcgacataaatggaggcgtcattgataaatataaatgattttttaagttaaaggataaaaaagagagaagaaatattacttaataaaaccatgcatggattacttgataattaattaattattttgataacaaaataaaaatttgattagttagtatattttgttaatattattacattattattttgtttaaaaaatggtataaaattttggtgatcaaataatataatcaaatttaattagagtaacaaaaaatgtttgattccatgggttggattgaactcttataattttaggacaacaaaaaaagaagacaattgctatgtctacttttaatgcactcgcttttctcaatttttttccaattaaattaccttgtaaaacacattcttccagtcttttactcctccaatttaattattttctgaaaaatgtacacctttttccttccgtataactcttcctctccaatttaattaattattttcagcaaacaatagtgggattatttcttcattctatgattgataagctctttgacttctcattatgtttctgccaagggattaatttcacctgcgatgaggtaaacgacggtgaactaatatgttggagaccatatacataataaaacgatcttctatgttactggactctgagatatccttcatcttagctcatcactacatcctttcctcttcaaccgatataattccaaatgcatgtgaatccattatttatatttgatcaaataggcacctctttgaagagttatgtcacgtctatcacgaatagcaaaagcctgttgctttgttctatagaaccacaaccatgactatggagtaattaaattgcatgtgcagatgtgttagttgtgtgacacttaattttgtgttatcatgtcctttgcacataattgatttattttgggtacttttatcataaagatatttaagtacttaactttgcacataattgattttacactagctactagaaaataagaatctgcaccttctttgataccaaacttttgttaaaaatattagaagtatagattagatcttcaaaccagaatttgaagtgttcaaactcaaactaattaatcagtagcaacccaagctaatgttatcatcccaaaaaaggttcttatatttcttggttttattacaataaaagttcagtaataatataaatacataataaaaaggataaaacattctaacattccttaaagtttgcaagaaatacgcttgacacctcttacacttaactctcctataatatagagggttaccaaccacatttcgtcttagagtttatttatcaattctacatataccatcaccacttaaaacgcattttcaccgtaaaagaaacacataaaattctaataaaaagttcttaagtctgaacaagtttcccttccccgatttcaatacatattccaacctaataaacaacacaacactacaacagcatcaccaataaccagattttccaacaaatcgacatggctacgaataacattggttttgataatgagaatggtagaattaacaatatcataaaccatgcatgcaatgtgcggagcacaactttatatgtggtatgacttgtaaggatctctcatagtgttgaattcgtggaatccagcgttgatttgagacatgtacatcatgtgttttcggagcttataatgtttgtaaatgaacaacataatgagggagaaggcgaggagagtgacaaaaattagaagggtaggtataaagaatctacgataaagtgtgataatatttcgcatggtctaattgagcgtggatggtatagaagatcgacctaagatgattttacaaggaagattgagaattacaaagtgggaagtgttaatttgtgttgtgaggtgattcttattatttgtattcttggagagtgtgtggcaaaggttgtgttgatgtccattgtgttttgtgttaaaggaattatagagtatttacatatagtgagtggaaagaagagaaaggaaaatatataggaatggttatttggtgttttttgctagataggatgagaaatgacttgagaattcatcaacatggttttaatggacaacatgcaaaaacaagtgaaaaggaaatatgaaaaaaccagaagcagaacatggattttgggaggaagactctggtttcgtggccttgttttaattcatgtacgcactagattttagattctacccgttcatgatgagaaaggttaaaaagaataatttaataagaatgcactaaatgtgttacaggtttttttttatatgtatgataatttttattaattttaaagtcataataaaataatttatgattaattgataatattaaaaaatctttacgttgaaagaagcttaaaactaaactctaatgagaaacacatctcacaaattttaaattgtaaagcaatatatgttttgtaagcatagcaatggaataaggtaaaaatgagttttgccctctccattatagtcctgacaaaggatatattcgggggttaacattgaggaagcaaagatgaaggcaataaattctttctcgtccccgttttgggaaaatctactccaaagtctccccaccaaatgttttttttttcttaattactttatataattaaacaaattatatataaaattcattctaatttaaataatagatagtacatcattctaatttaaataattctttcaccctgttttggacacctacactaagtttgtcatgtaacaaaaatatattttaaaattataaaagatatattatattgttggataggtttgtaattatttttcttaatacttcaacttaatttttatatattcccaagtatctttctaaatgattaaaaataatatccccaagtattcatttgttggaataccatcagataaaaataggagaatgcaagattcattcccacaaattaaatttaattagaagattgttaacaattgacacattattgggtattagttaattagttaaattttatttaaaattataaaattgtgaataagatttattaattaatgagtgataccacaaaaatttatgatttttattaaatctcatctaataatagaaagaagatctaaaagaacgtgctaaaaaatatatggttagtatttctcttaaacttaatgtggtggtataatgactctaatctgaaatgatgattctagaggttttgtgagcagattcttcacaaacttgggttaatgttcaattgtcagagctgaacttcgatggactgtttttgggtctcaaattagccatgaataaatggaaataactttttttaaaaagaaaacctatagtagacaataattctcaatataatctggttattgatgatatcctagacaatataatcttgtctaaagcttttaagtctaaagctacaatataatcttgtctatcacataaagaacctagacaatatcctcaggcaatgtcctccaggaaaccaactgtctgactcactaagctcggcaacacaaatcctttgagtacctggatcaacaatgtatggacaagaacctaaataagcaagagttaaattagtcaaaaccaatttataaaagggtgtacatattatgtgggtcaatttaaaaaaaatggcatgccctcagtaaatcttcttatgcttcaactcaacttagcaatagaactaaaccaagtgtgcaagttaaaactagaatcaggaaagtggtatgttataaaggaagtccctagcaaacttatgccaaaacgtgctcaagcttcaacataatttgcaacatctaattaagagtgattacatttagtgatttcaatatctaaagctacaatacagcaagcaagactgaaccaaaacacaggaagtttaagacatatgttcacttaatcagttaactgtaatcttgtaaactactatcttactagccttcaaatattttagattgataatcattggcttttcatctaaataaaactcttaagcattatcgtatcctctaaatacataaaagtaaaagtcaccgggattattaccttgcacagattatacataacaaatccaaaaatacatgtgaattttctggatggcataacagcatataaatcaaattggcaaagtggagaatgaattgaaaacaaaagctatcatataggtgccaagcattgaaatggatattgaaatctgagaaatcagaaacaccgaacatttgccagcaatgcagagatactatactcgcttaatgcaattaagtccaagtcagtaatgttgacaaaaccatatcttgcaactaaaaattatttattattgtatgacacttggatgtaaatattagtgcataatatatatgaaattactattttcaagcacccattctagttgcttatggtgacaagtcaaaagtctgccatgaaaatatggcagataacattgtggtctaaagtagaaacatgatggctagctaaaataaaaaagaattatacacacaaaaagtatactagaaaaactacagaatgtaataaaaaaatcataaaatacaaactacaaacatgtagtaagaaataaagttcaccaaatgtacataatccacagacttaagggataagatcagaagcctcacagcatatgttcagagaggacaaaacaaaggctcaacagaggagaaatagagagacttgtacaacacaaaaataaagacaactgaaaaggaaatgtagatgaaaggaaaagagagatacaaagaattagagaagaaaacggagaaacaggaaccatgaccacaatggccagctaatatatatatatatatatatacacgcgcgcctacaagctgctgccagcattctttcacagatttttcatcatggacttaagtacaggcgtacagaattaacatactagcgacttaagcatttcatcaaccaatgtggaagtgggccagaaatatcaaactaattggttctaagatacaattcataggaaggtgggagggggaaaagaaacattaccctggcttgatcaatgggtggtaggaggtaaactaagagaagagagtgaagaaataatgcaagattgaacataggcaaacttttgacataagaatgcgtacatcatatgagcctaataaaaagtgaaaaaaacaaacaaactaaattaacttccatttaaaactagacttaagtaaatttgttgtccctccaatttaacttttttttttatttttccttgtaattttttttgttttagtttttctaaaatatgtttattttgttttttatctttcaaatattttaaatagcgctttgaacaataaaaaatattttaaacaaagaaaaaaaatattatctaaaatatttcaaggatgaaaaaaagaacacattttagaaggactaaaataatttttttcagggacaaaaataaaaaaacattaaagtgtagaaacaaaaattatatttaaaccttaaaactaattttaggataccagaaggagagtgtcaatatcttttacatttgccaacacttgcagccggcttatgatgacaggataagatatataagtgctgcatgtggaggatagttcatgataactgaaacaggaatgatccatgattgtgagagaactagcattgggagtagaaagtacaattttgtactggcagcagataaactccagattcaaacttatatatgcagagaattttgcatcatgatgcaaggaacattcagaaatttacaaagttttcaacaaatataaactttgtaaaaggcacaggaaaagtgtgattcagagggagaagagacaaaatttggaacagaaatatcatttgattcgccgatcctaaaaaaagaaataagcaaagttcacttgttaagtgataaatgaaaaattcatagaaaattaagtaatttgtcggctaatcccctttgattcagcaacaagagtcggttatggaataatcttttggtcagcttctactttctgaaggactttcttgccggtaattgcagagatttcggaagttcaaggtaacagccataaggactgatgttaagcttaagaaatgtctaagatggacagtaaaacagagggacaaatgaattggatttgtatctgaaatagacatccgtaccaatactgttgttatgaaattgtgcagcacaacatatttcatgacacactttggactcatttcattgcagtagcactggcaacgaagattaagtaagtaaaatgaaccatctccactatatagaacccaagatacaaatctgttgtaattggcaggggttttaaatttttgcaatacacataataaaactctgaactgaataacatacgtgttgtgggacattttgtgttggaagcacggtttcgctttttcactatgcacctcacgttattctaaagaatttgaatagaacacttgttccaagattcacaaaaggcaagtaatttgtatgacttgaaaccaaaaattttggtctcaaggaaaatatcaaaataaagatggatcatatgtttcaaagaaagaatatcttgatttaagagagctaaaacctaccttataaaacttgtttattcaagattcaaataatactcatgaaaccctgcttaattctacattaaaaatattttttcttattcctactcgtggccatgcagtttttcttttgataatctaagattccattatctccagtcctatgtcccattcatcctatatagcgtttcctaatcctaatattaaacaaattcatctctcatcacatgcatttctcagcaattaataagacataataaacaaatccatattaaacaaactcaccacatgcatttagtaactcaattactagtaatcaataagaaataataaacatactcatcatagtaactttgacatgagttcatacaacaactccatagtctaatataataatttagttacatcggtaggagcatgatacacataatttccataaggctagcaccactaccacagaggctctccttaagactaggcaatgatgcaacatattacaccaacaaaaaaagaaacttcagattcatcagtctatcaagtggtcttttagtagtcttttgatcttttccccccttcaacagttctgttattcaaggatgatcaaaattacaagtataacaaaaagactgtccccagtaatagttacttaaaaattgtcatgtgccaaagccaaatatagcaaaaacaaggttacaagaggatcgacaaggaaattatatagcaacctttcacttgctgtgactatgagtattgagaagagactaagctagtattatcaggaagagaaggaaaaatgaagcaaaatcagaacaatatgtaaaacatactacctgaggatttaagtgttcttatcactctcagcaatttataatatcaactttggccaccggacattttataattaagtactctactatcctgctaactccctcatcagatatgtttgaagaagatttcattttcaatttcaatgactttaattgaacaaagcaagggatttgtgttatcattgaaccagaagttgagagaccctacacaatgacagtggattagagacatattttgaaaggaaagattgagtaatggacagaaatttgccaaacaggacatattatcagcaatataaaaagtaaaggaagaaacagaataaagttacttacatttagaatcttaagggtacttgaagagagtatcattatctttgcataatctgcgagcacttgcagcaaacttataagggctaaatgtgtcctttgaaaatgagcatcaaaataggcttcaacgtcaatatttacttgttcaagtaaagaaagattgcaagcagagagttggtgaataggatcacgcatcacggaaagagatctaagatttggagtagaaagtataaatttgtagggtgtttcttgaatggtactacctatggtcaaagtagaaaggttggaattacatatgcagaggaattttgcaccatgatgcaagttacaccggtcaatgaccaaagtattcaacatgtgacaagttgaaaagggctcggcacagtcaccttcacctgcagttagagtgacatgctcaagatgcaagcttttcaatgctggcaactgcagggaacttggaagttcagtcatccaagggacagcccagatggaaagcttaagaaatgtcaaagatttacaagaaaagatactagggtgcaacttaaaaccaaatttagcatttaaattaacttcaattgccaactgctggacatcatgtgacacagcatatcccatgatcatgtccaggagttcatgatctatacagcctttacgcctcaaatctagactatgcagggaaatggagctatctcgattcaacagaacccatgataaaaatttgctgaaatgtgcaaggttggtaaaatctgaggaatgcaatgccaaattcgagagacgtttccacagttccttccatcttgtagacaagacacaagtctgaacagcatgtttcatgctcataaatttcattatatgaagcaaaacaaggtcaggcaagtcactaagcctgtccatgtcctctttcccatctctatcactcagcatttttcacttcaacttcccctatgcccctttttccttcaatcacacctgatctaagaaattcaaacaaacatatcataaatttactgctcacagttttacaaaaatattgttaacataaaagataacaacttgtaatagtaggatctaatggaagaagaagacccttttagaaattaaatactaaacaagtttatttccatttttcatttccaataagacaaacttttgtgtttgaccctttaagaatgattgattgaagacatatactttcctaaatcattgaggaagttacacatagaatgaagtaagccaacagattatacatacaaataccttgttgggtgattggggatcctaccattcaactgatttgcaaaatcaatcaaacaaacaaactccaccacttatccagaggcacttcaagttttcccctttaaatcctaaaagcgcttattcgacgtgctttcaatcggtagaacaatgagcgagcttacttgtttttaattctttggcaacaggttttgctttcaccgttataaaacggataagagtgccttcttttgcagcgactcagggaggttgcgtgttcgatttagaatatttgttttggtgaagagattttttttgtttttttaggaaaaaaaagattttttcctaagagaatcttatgaacattgatgtcttaacctgtttttattgtctgaattctgagaaacgattttaacttatgagttaaaataccaaaaaaaccatgagttaaaaaattattattattattattattattattattattattattattattattattattattattataccatctctcgcacttttttatattaaagaatgagagaattaaacgaaaagcagagaaacgggagaattttttatattaaaaagtttttcttttttctttttgaatttcatatgattttttttcacacttcttatttttatggtatacgaatgagtgagaaatttttatcctaactttttataattttttttttatcttatgcctgtaggaaaacaaatagagtagtattaggaagataatataaaaaaatgttattcaaattaggctaaatcatctatttggttatttattttgtttgttaagtttaactctccattcctttaaaaagttaattataaacggctagaattaataaattaaattcacttattaaattttaaggactaaaaaattctcatattaactataagaattaaaagtgataaatttaaaaattataaaaactaaataaataattaaatttttatattttatgttatttgtttgatttgtttttatcttttatttcatttgtttattcactttggtttttcagtttatttaataatgatatttttaatcatttaaaaataatttttttggtttagttttttctccttctcccccactttatttttaacaaaaaagtacaatcttaaatgcataataatgttaattttaaataaataaaaaataagataaataattaaaatatttttttaaaaaataaataagtaaactgaaaaaataaagtaagagataaattaaacttttgaaaagataaaaaaaaaaaacaccaaatatatcaactgtgcatcaaattaaaacaccctaccttcccaagtaaggtttctttgttaaaaaattattttatgctagagctttcttaaattttacgccagctttcttagttctcacgccacctataaatccaaatgcatctatataagttaggttgacgtatattttaacttttttattttatttttatgttatacattttctcttaattttaataatttagtacttctacaaatctcaagtcgtgcaatattaatattaagataaataaaaagtattataaaaaaattaaattctttttatctttacaaaattatttattgaaataattagtatttaacttttacttcaatctaaagacaaataacgatgagaaaaagtttcttaaacagtacgtgtattaacttcttgttaactatcatctagagggatttttgtattttaaagatttttctaatataaaaaattgaagtgagtttaaaactaacaaaatatttaagaagtatttacatgagtataatgcttaccaactaaatcaacttatgttgtgactttattattaagtttcaattaattttaaatatataattgtattaaatatctgaatatttatctaattcgaaaaaattaaaaggggcaatatcggaaaaaggtgaaaaactttggatgcttctgctagaaaacacggttctgtgaagaagaagaaaaaaagaaggcattttgcgactgcgcgcagcttaactctgcaattcctttccaaggtaccagttttgttgatcacttccttttccctttcactcgctgtatgtttcccgagaaaatggattttcttttttcgttttcgttttcgtggaatagacgatgaagtcttatcgctttaatttgtgagtttttaatttggttacgaaattcaccagagtgatggttttggacttgtggttgtaaatggaattggcgttgttggatgtgctcaatcgattttatctgttttgttcttcgcctaatatggatttcaaattaccgtgtttcgcatttcctactgtgtaatgaaattgctttgtgtttatttctgagttaaatttagttttatgtaggtttgcttttaagatactagttacttgtgtattatccccaaggttttagggtttgactgtcaaatagtaactttcaaattgctgatgttatggtagtgaaacctgttaaagtgaaaggttttcaactttgtttcctatacttagaaacatatgctagataaaatgttttggatttgtaatttaataatctatagttcaagtaattgatgataatgttgagtttctggtttgtatggagttaataaagttttattcttgtaatatgaaatatgaatgctatagtaagtccataatagtcattggaagatggaaacaagcatacagtattacttgtctatagcaggacttttttcagtggatttctcaactctcaattttttaattttgttatgaatcaatcttattacctttgcttcttcatcaaattcttagttcacaattatttctctcaatttattatattgcttttgcattcttcaactagtctaggatggtgtttctgcttagatttttcattcttctatattttctcctttgacccccctcccccctcctggttatttatttgtgttcttgaagctcaataacttaccgcataaacctctcatgtttttccagttgatcaagcgacttcaggattgccttgcatactttggtgtttgaagagctaatctgtctaccaaaatgaagtaatgcaagcaaaaaatcttctttttatttgcttatataattttttactagaaaattcttaatctgactgatatcaaatggtccttcttattgcatattgtatattatagtgagataaggtgaggaatctcttcacctgggataatttaaccatgaaagttttacaagggtaattgtactttctaacaagttgaaaaatttcatgatttattggtgaatatggactcttgggaacagataacttatgtttcaaaaactgcatattattaaaacaaagtcaaagactcaaagttcctttactttcatgctttctagtttatttttgtttgatacaagaagaagcctggatatatttgaggaaacaaatcataaatgaaaggtaagaaggttaagactatataatatttggttgtagcatatttttgtgggtacttgtccttttcctagggtaggccaatattagggagatgatctttatgataccttaattagcctggggcatttatttctgaagttggaggctgcaactcttgtggttcaatattatatagactatgtgtatgtttttttttgttagaatacagcctaacagatgtttagcccaatgcaattttttctttctttcatgttttcttctttgtaatgcattcaatgacttcctatatgtaaccaaagcctatatatgtttagttagctagagattgtataacaactcaaattctttctctgtcttgaattttagcacaaatagaacatgaaaggtgaggataaaaataatgttttgttgattgtaaagcatgactgatatgctgttaggaagatgcacaattaatcagggttgctccaatgctccccaggatttggaattgttaaggagtcactttgggtattagagttttgtaatagggttgttatcagtggttcctataatgttctaagtctatttttggtgcaaattattttcaaagatagaagataaaagatgcttttttgaacagtgtctcaagagtttggagtttggatgataaatgatcatgccattttgatgtttggtatgattgtgacagtaccaccaataaataaggtctataggaggaggaataggttggacagcagggaaaacagaatatcaactaaagttaggtaactaactaaaggagaagttgtagggcaaaaccaagagaggggggtagtttttattttaggaattcattagtgggtaaggctgcgtacaacatccctcccccataccttcgcatagcgaagagcctccgggcaatggggtacgaagttttttttattagtgggcagagcttcaggtacttggaaggttactatcttgagaactgtatcctgttgggtctctgttcagtatcactttgatactgtatcaaatgaaatttctgcaataaaggtgtgctatggtgttgcaaaattccttggattcacaatcgtgactctgttgcggtgtgccttccacaaaattggctattgcagtaactatgggtgttgtggttgcactgttgcagcttgtgtcgcagcatcaaggatttgagagatggatgtggaactgcacgtgacttttttcctactcaatcctagtgtcccattccctcactcacgtaaaacttgttaaacttctctcatatgtagatatctgttcacagcttcacataaggatcaaggaaggactcctccatcagcatttgttcaccttctcctgcatcttgtcatctccgaccagtctctggccaattgaacttttgagttaatattatgccaattttatgaattttatttttatttgcataaaacaaacaacactttctgcccaaagaaaatttctcaataactcgagtttgtttacaaagcccatacaaaggcaaaagtaaagggtatggtcgttgctagataaacatgtttgtatcaatccaacgtcaaattaaggaagaaaaatgggctggcatttctgagttcaattttgttttttaatgtcttagaaatcttctggattagacttgaaatttgatttgaacattgcattgcttgttgaggaatgtgtgcttattgattgaaaaatgaaaatgtttaatggaatattggtacttccactctaatggtggaatatatattttaggagtattccaatgatctttttatttttatactgttctactttcaagctcataatattatccattcttaatgttgtgaatattgcttttggtattgcgttgtaggggacgtgtaaggtgggatgaggctaatattggagaaattgaggcaaacaaacctgtgaggcagaaaattactgagcctaagactccatatcatcctatgattgatgatgacagtatgtaaagatcacttaaactttatgtttctatttaattaagtctgcatgtatgggtatatggctatgtatacaaataatcttctgattttattttaagacttatctactacttttaactataatattgcttttattcttctttagttgaccctctgcatggtttgggttgtaaacttgtaaatctaaaacatatatactaagctaactctgttgataagtatgtggagatgctctttttgaagttctattctcaggcttgctcttttgttatagtttaaaaagacattgtatgtgtagcaacttttcttctgaaaatgactatgtattacctaatttttctaggttctctatcccctgtacgaggaagttttgatgcatgtattgatgatcaaaatcacacgatgcatgctgaagcaatatggagtgctctgaatgatgtagcctccagtagcagaagaggcactggacaatctggtggttggacgtcatctgaggatgagccagaagcaatggagcaagatgatgatggtattgtactattatttgattgtttttctcatagatcatgtcatttattgctttttttatgattgttactctttaatgggtgcttgtgcttctcctttatgagatttggttttaattattgctttcttatcgaaataattgaaatctttgaaaatattgccttaatttgcatattttaacttgtaaggattataaggtgaagtcaggttgtttacttttgctttgacatttattatgtgattcttgtgtagataatgatggaatcagggttctgacagacctagtaaaatagagctataaatgaatttggttgacgttgctcatgttttctgtttttgttattttagcttcataaacaagaatagaaagtcggttgttactgctgtgaaattttctaatttttctaaaccggaattatatgtatatgaacataatatttgttgaaaatgggtgagctaatatatcttttggtcctggaaagtgacaacttgggttgctttggtccctgaaagtgtttgtcttataaattgttctctgaaagtgtgaacttgctaacaagttcacactatacagttattaacctgcaaaaaaatttatctcctaaaggactaattttatgtatcacaactttcaggaaccaaagctatacaagttgtcacaacttttagaattgcttgcatatgatgagttagttctgtcgtgataatttgagacaaaataagacagcagtaattatctcttctttctgcctatcatccacactgttggatctgaaagggctttttctcgttggtggtgaccaatagctaattgatttatacagcctagaatgttctgccaaatcttgaatagtacttgtgcgggcctgggcaaaatatcagacttggagattgcttactgtttcaaatttcagtaaactgtgtgataatgagttgggatctatttgatagtgaaaaggaaaaggtattggaatcttgtcatttctttctcatggagggaaattattccatttagatgagcatgaaacattttttgccattttttttccaagtaatttagtaggcatatttgcttttgtattaatggattgcctattcatttactaacgtaacctgaaatactgttagattctgaaacagataggaacttgagttttaaagagcacagaaaggcccactatgatgaatttcttaaagtcaaagagctgcaacagaggggttctcttgaggatgaaagtgacgaagataataattctgaacccagtaaggtggagaaatgtgagtcgtcttcactgagtgatagtgtaaaagagatggacatcgagggaaagaagtcttcaactcctcaagctaatggttcttagacagtgatcgatgaaataaaatccactgtctagtttcattttgtggattcaagaaaactaaatgaatcactgtttttgtatcatttgtatgtatgtagttcctttcttcatcatgattattatgatccgttcacacttttgtactctggtaaattggtttgttttcggcatctttgaggaatttgcttgtggcttttataaggaattaaggttggatgcttaaagggaggaaatatcccaaactgaaactatatttcatttcttatttccttgtgctttttatgtgatttgtgtttgagtattatgccccaatttttaatactatcagattcagatgacgagccctggtgcagcggtaaagttgtgccttgatgacttgttggtcatgggttcgaatccggaaacagcctctttgtatatgcaagggtaaggctgcgtacaacatccctcccccatggggtacgaagtttttagattcagatgaatctcttgctgccactgagaacccaattactatgcatacacatcaaaatgagtttaactttatttaaaatgcatcattatttcctaataaatgggaagtttaactttatttcattgacaaagataaagaataactgccaccaaatatgcaccaaacaaaacatacccctaaaataacaaccaccgaaccaatgtcagccccaactgtgaagacaaaaccattacagggccaacctctgtatcatcacagggtggttgaggcggtggtgttgggtggaggtagggcttgctttggagaggcaggggtattcataccaggcatgccatcaccaagcaatggtatcatcactaagtgatggaggcagggcttgctttggagaggcaggggtattcataccaggcatgccatcaccaagcaatggtatcatcactaagtgatggaggcagttttcttcaaatcctacaaaatctccaagaattaagtgattacattcttttataatttctaatagtatttctaatatttttgcttaattttagtgattcctaactaataatgacatttcttatgatttttgttatttaatttcttgaattgactcactaaattatcattaattgaagattcatcaactctcataaaataaattttgaattatagaaagataattatctaaaaaaaaattaacttaacactttgaaattacacattaattatatgaagactttaaccaatttaaatttataatcgcttgaatataattgcagtctccaaaatattatatgttttttaaattcgtttcaatttgaaatttgttgattttcaaaatttaaaaattataaaaagtcataacacaccatgtgatattagatgagtaatcataaattcataggattagtacaacaatctaagatctcaacacattcacatgtagaataatgatttatttaacatgaaaatacatctttagtgtgtaaaattttcttaaattaatgataatcatgtatcgacaatgaattaatttctgacttaatcagttgaaaaacatcgataatctctaaaaaaaaaaaagaatagtaaccataggatgatttccggctagaaggcagcatgaaactcatgcgtacctatatagaactctcgaatacattattatgctctgtatttacaacattaagtttgagattcattgctctgaacaatacaaaacgataagaggaagtttgcaagtagtacgtacacccacctaatttgacgaaatggaccagttatctatttattcagtttcaactccttcaaaggtagagatcgacatttttttttctaatatttttttttatttccaaataattataagagaaaatttgaattctactttcatcaatttggtaaacttttgcatcaataataggaaagtttaggagttcaatatttaggggttttaaaacgaaagagagaacttgtactgctatgtagttcttttacaaagtagttgaaacttttatctataataattaaaaatctttttttattaacattgttaagtaggttttttgtttttgtttttacctgatttattatagtcaaattatatataaagatgtgagtctactaatccttgacgcaatcactaaattcatcttggaatcgaagagtacatgcgcgttttgaaaaacaagaaaccgtccacctcatacaaattttcttgatttttcatgtataatatttcaattacaattatgggtgaaagcatgtgctatgaaagcatgtgctgagaacaagtatacaaaatttcagctagtataagattcttcactctacgttgttctttgttttgttttttctttctttctctcagtttcgcattgaaagtctaagcaaacaaacaattgattctattttttaattttttatcatcattttagatgtcaaaagcaacaaacacactatatttcaaattcaacaataaaaatacaattcaggttcagctgcatgcctcaacgtttcaattcaccaataaaacgtgccattggaatatgagttgtacattggaggctaagttcagtgctgtcacttcaatttacacaggaaaaatagtacatgtcacttaaggtgagtgcaggttaattttgtgcagacattagatgcattgcagtagtggacaaatcgaccaagtagatttactggattctcacatgtttttatcatttaaaactgaggtggccagtttttagaattaactacgtcataaactatccagttgtgtaattgaaatgatcatgatactaacttttagttaaaccggtctgaattggtttgatcccagattttatatatataacatttgcataaagacaatggataattacatgcataattaatgtttggatttcctcttacttgatttgaaacatgataatgttataaaagaattaatattcatttgaatactacatatttgatttctcttaattaaataaggtatcaagtttttgtatatgacaaaatatctactaaaaatttagtttcatattgctgtaaatgttttgttctccaagaaaattatatttgtaaagtatttatatatagtggtaaaaaaaatataatacaataatattatatcacaaaataaaaatacaaaataattaaaataaaatcatctgtctcttatataataatttaaagctgaagtgtgcgaaccattttcatacatccatatcatattattatagagtggtgacatcttgacgtacctttcaatatttcaaatatctctttaataatttttatttttctttatttttttcttaatttctatcacataattatatcaaatatcatatctatattttttgttttcatttttctctctcaccagttaggtgtctattgacatttaggtgtcaaaatatatttttcatgaactcatgatatttttacatcccactattttgaacatttgatcaacattttttatttattcctatctcttttttctataatatcacttattatacatatatttttaatcttttctcatcactctctaggtgtcaactaacattttaagtgttcaaatatatttttcttattattattgtttttcaagaatttagaaaagagaaatcatatttgaacacttatttttttaaaaacattccattaatatttatatctcatttttcttatcccatcatatcaccaataatgcctatattaatttttctttctttcatctttctctcactaggaatccgtaaataatttaccttaaagaaagtgttgcacacttaggtcgtgtgtaaaatatgaaacgtaaacatattctccacaaacacacgtagctagctggcgatgatttccaagttccaacgcttataaataccatattctgcattgatacgtattaaggaaaagacactacacactactacaactaaaacccaatgtcaacctctgaaatggttgctttcatcccattaatggttgctttcagcctctttgttttgtgttcttctgtccacaatcacttatcatccaaatggaataataattccaacaccgcaatagccaacaaaactacacaactatctcttccaaagcttccaataataggaaatctccatcaacttggcaccctcactcaccgcactctccaatccttagctcaaaacaatggccctttgatgttacttcattttggaaaagtgccagttcttgttgtctcaactgctgaggctgctcgtgaagttatgaaaacacatgacctggttttctccaacagaccacatcgtaagatgtttgatatcctcttgtatggttcccaagatgtggtatcttcttcatatggccatttttggagggagataaggagtatctgtgtctttcatcttctcagtgccaaaaaggttcaatcctttggtgcagtgagagaagaggaaatctccataatgatggagaatattaggcagtgttgttcttccttgatgcctgtgaatttaactgatttattttttaaactcaccaatgatatagtgtgtagagctgctcttggaaggaggtacagtggagaaggtgggagtaagcttcgtgagccattgaacgtgatggtggagctattgggagtttcagtcataggggactttataccttggcttgaacggttgggaagagttaatgggatatatggcaaagctgagagagcgtttaaacagcttgatgagttttttgatgaagttgttgatgagcatcttagtaagagagacaacgatggtgttaatgatgaaggtcacaatgattttgtggacattttgttgaggatccaaaggacaaacgcagtaggacttcagaatgatagaaccatcataaaggctttgatcctggtaagtatataagattagtacatgtctaatcctgcattaattaggtcctaataattaatcttgaaactatatatatagggatatgtttggataaattttttaaaaaatactttaaagaaaaaaattgaaatgaattttttcatgaattaactctttattaactaatttatatatagaagttctatcatatcatttttctaaaagataaaagtacatttataaatttataactaatgaagaattaatttaactcatgaaaaattcatttcatttttttatatttttcttatcttagaaatgattttagataagtttatccaaacatactcatagtcgatctttgtttctaactttataaattctttacttttctaattaaaacataatttactctcatcctttatgtcaaatgatgtgaaaaaagacaagtaatggctttgtaaagtttagataaggtgactggcgtatacatcctaagaaagtggtggtttactatttatttttgtatcttccacattggtgtaatgtaaattaggaacaacattttaaattcatttggggttcagtgagtagtatgccagagagttttattaggttctaatttttatttaataaggcttacatgaattccactcttcaagcatgctagaaaacactattaaaaaaagagttaaaagaatatgttactaacctttctttttagtctaattattgtacaaaagttatattttccttttaattccactgtagtatgattcttcgacaaaatattaggtcatatgctttgctagttatgaaaacttggataaatgttgagtttattttctttcttggaattcaaaggtcgacaacgaaattgacaattaataggaatttcttttaggatatgtttggtgcaggtactgatactaccgcctcaatcttagggtggatgatgacagaactcttaaagcacccaattgtgatgcagaagctacaagctgaggtaaggaatgtggttggagatagaactcacataactaaggatgatctgagtagcatgcattacttgaaggcagtgattaaagaaactttccgtttacacccaccacttcccttattgattccaagggaatccattcaagataccaaagtgatgggctatgacattggaattggcacacaaataattgttaatgcttgggcaattgcaagagatccttcatattgggaccaacctgaagagtttcagccagaaaggttcttaaatagttcaatagatgtcaaaggacatgattttcaactgatcccatttggagcaggaaggaggagttgcccaggattaatgttttccatggctatgattgagctggtaatagcaaaccttgttcaccaatttaattgggaaatacccagtggagtggtgggggatcagacaatggacatgactgaaactattgggctttccgttcatagaaaattccctcttgtggcagtagcatctatccctacatatatatgaagtgaataattaatgataaaataataacttggaaggaaaatgaaataagggattttaatctcaataatgtattatcgaaatattttatggccaatagttcttttaattataatgatagttgaataaatgtattgattggtctctttagttgtggctattcaatactttgcagctaccattcaattgtatctatacagtgtttaatcaagcgatctttataatttccttatcaaacaaagtcttgtcaacttaaatttttgtttatgatcatcaacctggctagtttttttattttctataccttccattgtttttttaaataggcaaaatatattaattaggagtagtagaggtaccaaaagcaggatataatcaaatagcaatttgaatcagtctctgaatcccatgggttatacagtatttagacctaaaaatgaggagtgaatacttacaaaccgaaggaataaggtccactcatatacttgtccttgccctaaaataataacccaatcactcacctccccaaacaattacaacacgcaacgttaacccgtgctgggaaggtgcttttttggtggattgttaatgccaatcaacaatataaaggaggagcactttgatgttatctcagaccataagtttcgaatattcttctatgtatgcaattcacgattgtatatgttaatattcagttttgttggatctgtatggtattagtttggtttgcgtctattagttgctgccatagcttgatggcactttcagatgggtttttcttagttgtatgctggggatcacgtgtatgatctgtccgctgctgatatatgttcataagtttatgatcaccacataattaagtccatttatcctaaattttaatcaaattcatagttatattttaggtggaacacatcaccaatttatgtatttctctgaagtttaaagctttgagtgttgtcatggcttgctattgccgtggtggaaaattgtcctttttcaacttgaatgacaacaaaaattggaaaactatcgaagtactaaaggtttcacaggaaaggatgtacgagtttcgaaggtattatatctctggtccaatctagcttaaacaccttcaaagatatttaatatatatatatatatatatatatatatatatatatatatatagaaagtgagttaagtcgaccagattttggaaagggaaattataaaggtctcttgattaaacattaatttcatacgtataatagagatctcaaagtacaattgaatgtcaaaaatacaataattgaataaccataactaaataaaccaaccaatgcagttcaactatcattaaccatagattatactatgaaggcactcttggccataagttattttaatgatacattaacgagagaatactcccttatttttcttttcaggtatttcctcttgtatatctttaatattcatggcttcttatttccaccactgataaaaaaaaaacgcttcttatgcatgtggggatgcaattgctataagaggaaattttctatgaatggataacccagtagtttcagttatgtccattgtctgatcccccaccactcctttaggtattgcccaattaaattggtgaacaaggtttgctattaccagctcaactacaaccatggaaaatgttaatcctgggcaagccctccttcctgctccaaatgggagcagttggaaatcatgtcctttgacatcaattgaactatttaggaacctttctggctgaaactcttcaggctggtcccaatatgaaggatctcttgcaattgcccaagcattaaccattacttgcgtgccagctgcaatgtcatagcccatcaccttagtattttgcgtggattcccttggggccaatatggtaattgggggatgtaatcgaaaagtttctttaatcactgccttcaagtaatgcatattactcaaatcctcttcggatatgtgggttctatctctaaccacattcctgacctcaccttgtagcttttgcatcactattggatgccttaagagttctgtcattatccactctagaattgtggaggtagtttcagtacctgcaccaaacatatcctgaaagaaataacttggaattaattccaagaaaggaaaataaactaaacacgtattaagattttgtgcaacaaatatgcgacctaacttttgcttaggaaagtagagtaaaagcacactacatggaaaatcgatcgaaaaacacatagcttttggaaaacaagtgaactagagaaaatgttcagaacttattatttaactctttgcaatagactcactctacgtaccatgaagtttcagaaagtaaagattttatgaagttagaagataaggaataatatttagaaactcgtctttctaaacacatgttaaatattcattatttttttatctttttttcgatcacatcataacactaataatatttatactttttttattaaaaaagattaatgcacaccaaaatactattacaggcctaaagagataaagagagagaaaaatataggtatatatgataaatattatgatgtgataaaaaaaaagagaaataaaaaaaatatctattagatatttggattttaagagtatttaaatcttgaaacttttttctatttttttttctttctctcactaggtatctttaggcataggggggtctaggtattttttttttttttagaaaattaggtagttggctattagaattttaggaactaaatgataaataaaaaatgtattaatattacataccagtatcaaagcctttatggttgttctatcaatctcaaatcccatggcgtttgtcttttggatcctcaacaaaatgtccaccaaatcattctggtcttcatcattgacaccatcaccatgcccatcatggcctcccttattaacatgctcatcaacaacttcatcaaagaattcatcaacctttttagccgctctctctgccctaccatacatcccattaactctccccaaccaatcaagccaaggtaaatagtctcctaaaaccggagtacccatcagctccgccatctcgttgatcggcccgcgaagcttactccctccttctccactgtatcttcttccaagagcagctctacacactatatcattggccactatacaaaataagccagttaaatccacaggcatcaatgatgcacaacacttcctaatattttccatcattatggagatttcctcttctctcactgcctcgaaggattgaacctttttggcactgagaagatgcaaaacaaggatactccttgtctgcctccagtagttgccatatggagcagatgccacatctttggaaccatacaagaggatatcaaacatcttacgatgtggtttgttggagaaaacggggtcatgtgttttcaaaacttcacgagctgcctcagctgttgagacaacaaggactggcacttttcctaagtgaagtagcattaaagaaccataggtttgagctaaggattggagactgcggtgaatgtgggtaccaagttgatggaggtttcctattattggaagctttggaggagatggtggtgagggttttttggaatcattgttccggttggataaaagattgaggaaagtacgtaaaagaaagaggatgatgaaggtaacaactgggaggaagaaccaacttgaagagttttcttgctgagagatccacattgggtttctcagttgatagatgatgcaatgactcgggctgtgtgtagtatcttttctttataaggtagcgttggaggtcctcaccagctacgtgtttgtgaaaaatatgtatttttttttatcggtagaagtttataatattacgcatcttatgcaatcgattgaattagagtaaataattaatctgtcacttttttatcgttgaatatatagtatgggatatataaattcttttctagaaggaaataaggatagaaaaaacagaaaaacaagtaataaatatcaccatcattcatcaatggcggctgcaaaaatttggtaaaggaattatcaattaattagtccaaaaaataatgtaacagaaagaaagagccacgtagaatgaagaatcttatgctagatgaaattttctacacttatttatattatttttagaagcttctacacttatttcagtcgttattgatggcttttcgacaagctaggctcctattggaagggcggactggactgtaagtcatatatggatgctgcaattaataatgtaaagcaactatgaagtggataatattgtttgatcctgacatatatgttttagggtaatttctgcattaggtaacatgttttaattgatggtttaattattcatgaataatatacttgtaactattaatagttatatagagtatttggtaaagctaggttaaccatggggtcttccaagagaggtgttttgggagctaggtaacaatctttcgtagtagtttggagtagaatactaactaaaaaatttggtcgtttcttgttagatcgaggatgatacatggatatttatgtttttttttatacatttaacaaatatatattatttctttttttctatttatttcaaatcatattatttataaaatttatatttcagatctatattttttcttcttgttatttgaatttgtttgactttgtttcaatataggatattatctctgtagcttttaatatagtcttattgcgtgccttaagttattcaattacatatgcttgactggaagggttgaaaaattaataatattactttcagatttgcagtggaatgatttggcttggacctaacacataaattaaagaatacttttttaaaaaaaaaatcctacaaaattgttaaataagcaggacggggaacaactttcttttaattttcatgtgagtttttagaagttcttgtcgcataaatcttttatttaatgtattaattttatctttattaataattattaatctggtgaagtaaaactattaaagtatgagagtattatatatcattatcaataaataaaaacactaataatacttgaaacatttaataagaattaataatagaaaaacaattaattgtttcataaaaattataaaatgtcttaatcattaatttcatttaaattataccttatattaaagataagagggagtaataaatataaacaataaaattcaaagattcaaaactaatagaaatatgacaaaaagtttataactgagttaattaagaataaaaaagttattaagttatcgatggcttttttttgtaaagatcaaaaacttttcaaaaataaaaaaaaaagtttcgcgaatattaaaagataataataattttatttaattttttttgaaatatatatgaataaataataaataaaatcaattgtatataatatgatttttagtgttaatgttaatttttgggaacgttagtgttaatattttaatattcaaataacataagtataaataaaatattattcattaatttttttactgggtgcaatggatttgatcaccatgtatatagtgctacattttgttcttcctaaattgggtcatactagaaccacattttgtaaatatgtgaatagttctataaccacatcactgggaagtgtgaactaaaatttttccttccttattagtagtaaaaggggaaaaataatggacttacttgtagtgtatctccaatgtttactactagagctccaggaatagggggaacatcaatccattcattttggctcaaaatttgtagcccaccaatgtgatcttgtagcagaactgtgaggaacccaggatctgagtgtctgtttgtgcctaaagtaacatgagattcaggacatgctggataatagtgcgtaagaattgaatggccttttgcacaatcattgccttcaagatggtcagacttaattgagtccaagtgcttctgatagtaatgcaaacaaaagtccccccaatacttgaacttgccttgagtactccattgttatatccctgtaaatgtgtacaatttgcaaaatgaatgtcaactattattttattgcaccaaatcaattgtgtttttactacatcacattatttcaacaacttctagaaaatgctagattccttctggtgatggatgcttaatgtgtaaatcgaaaattcagctcggcaatgaaaatgaattaccttatattgctgtggtcctcctaagattaatttaaacaatttgttggtatgaacttataagtaaatcgaaaatttggattaggtgaatttattacgaagaccaacttaaaataaattttttgactcgagagagaaatacaaattgtatctctaagatcagattttgcatttatactaccaaatgatacaaataaaacaccaaatctttaggcaaccgatgtgaaacatgaacttggactctcaaattagttaaaccttaacaagctagctacaaaaatgattggtaaagagaaaaagataaaagagatcaaattgtaaatataatagatgataaaatatgacaaaaagagagaactaaagagaaatgtaagtgtgatgggaaatttaaaataaaaccgtgttcatgtatcatcattaaagagaatttgtatgtgaatcatttgaagttttttttagtttctatttgataaaataatgtgttattaatctgttgctagatactaaaaaaacacaattttataaaatttaggactagaaataaaggctaactaaactatatttcgtcatcataaatatgataaatttttatttcacactttgaaaataattcattggtcctgatcttcatgattttttaatggtcaatatcatcttaatgatagcatgtcatacatttaaacattttgcatgatggctatggtaagtatgtataaatacccatttgagcacgcctagtgatggaagatttagatagaatccatgagatcgaaagctttaatactataaaaataaaataaatttagatatgtttaaatgcatgttatataatggtgataaagaccatatggttggcagaagtgcaaaacgaatttagtctattgtgttttaacccacccttttataagcaagttgagtcggaagcattcctttcaccttacttgactcatcttagtttcatgcaccaaaaaatgagtttggattgaagcaatgagccaacctgtttgatcatcctaagagactattttaaaaaaaattgtaaattaaaacaaaacaaaaaaaaatactttgcaaagagtacaaaatttgttatattcacaccattaataaacactacaccaaacatggagtgataagatgatttggtgattagaagaaagacataaaagttggaaagataaagagataatgagtttgaatcttacactaatataatatttttttataggcaaaaatcaaatgctaaagagaggttataacaattaccgactaatatactaactactaccaataatatttaccaataaaaaaacacatcaaactttaaaaaaaaatcattatctttgagcattgttattttctcataaaaaaattatttatcttaacactatttttatttgatgtgggacttcattatatctcaattttctcataacatctctggtcatgtgagactttccccatgcccctcatgactcctctaccatgtgagattctttcaactcgtcctcttttcaggcatgaccacaatagtaacatcaagattacttactactaagaaaaaatggatatttttatttacacatttcatattttactaaaaacactccattttccttttttttaatttaaatttacctaaataatcttttttttctttgtcttttttgatagaccacctcacctaaatttcaaggacgaatttgtctacaatttgatgaatacaccaagccaagaataccttgtctcagctgtgaaaatagtcatgaacgtgaggcttagtgcaagctcccattgtctatgaattgcatcttttactttggagttgggcattgaaaattttggtagcccagtataataacaagtcattttagggattgtgaaaggacacgaagccgttaggtagtgatggccctaattaagctggagattagagtcaggtttttctattattcttcctctctctaggggattctctgggtttgcatgttcctatcttttctttgaccttttccatggccatgtttgagtagtcatcttgtttaagattgggcatagtcttttgatgtttttaatgaatttctaatggtctttatttttatatgcaaagtttgttttcctctcattaattgattcttttcttattgtgcttaattaaatgaattggtcgattttctattttgtataatcttagatgttggattactgacatgagatagaacaattagtcacaagttataaattttttagttatagatatatttaaatttaaattattgataatttaacaaataatttagaggttgttatttttgtacgtatcctacatatctctcttgtatactcataattaaacttgaataaaatcttaattatttcattttttttaaaataatatacataaccagtaatttaatcgtcagattgatctctttttttttcgtgatcacttattattattttcaatttatctattaaatttaactttagctaattatcaattatcatatacaaacaaataattcatcttcttaaaatcttaactatataactgggaccacgtcatgtcctttacccaaaatcagttttgatggttttattttgctcagcaaaaaataaaatatatattgataatagagaaggtattggatgtaccaataatagaggacaaggttagccatgacagcacaccatgaccctgagaacaaccccctgaaaccacaaggtcgctccctatctaaaccaaacaagcatatataaataaagagtaaccttggtgacagataaatgttaataaaaataagtgaatttaattcaataaatgtttgtttatttatttattgaatgattctttaaccaaccacttaaaaacattgattactaaaattcttcaaatttttctaaacaaaaatataaaggattttgttaatcggatttagctaagaaaataagaatgttttaaaaaataaaatagttttcaaacatcaattgaaaagtcaatactaagtaatattgtattaatagtaaattcgttacatatgtatttttttattattaatttttaatcaataattaaaatatattctttaatactcaaaaatacaaataagactgacattatctcaatattatatatcatttgtaaacacatttttattttttttaaaatcatgcttacaactcacaacttgaaaaaaagatttcaaacatataggatcacaagaaattttatatttcaaaaaatataatttaacatgattttcttctcaaataaattaaacagacaatcatatttattattttttttttacttcttgtataaaatattaaaaatttcatccactaattaatatttttaataaaaaatgaaattcatttcaccacaacaaatatcatcacatgagtcaattgaaaaactaattataattaaaagtccaaagctactagcgtctaacaagttaaaggtgtatcttcattatctaatgaagaagttaatcaaatctcaggaaggcattaagaaaaaggcaaataaataaattgtcactaaatcaacttttaaagctttaattatctaagaagtcaaaagatgcatattcaccctaaagaaaaaacgaggaagatccattaaaaaaatgtgaaaaaacaatcttgtaaaagctcaaacctattagcataaaagaagtcaaaaatacatcttcatcctcaaagtttgagtaagacaacagaacaaacttacttcaaagtttgaaaaagagtacaaagaaaataaaattcaccaataagttgttaaccaaaaaaaaaaaaaatacaagaaaaataaacaattttaagtattttattcgcatcaattttatgttgtctagcatgattttttaatcctaaaatcaaaccaaaaccctaatggtttgtacttggtaggcctaaaggatagatagtaaatggcaatatgttcctttatctaatgcgaattacatcgacgccgccgacccagagtttcatccttcatctattttctatactctctttccttttccatttccaatgccatctttctcattcttaagaacactcaggctctctctttttccgccttataccccaattgcaattccaactgcaaccctccattctcaatctcattctcaacctcactctcaccatcatcaccatgatgctgttgcctcattcaatcgcatgcttcttatgcgccctcccccacccaccttcctttttaacaacattctgagttcccttgtcaagaacaagcgttatcccactgtcatctccctttttaaacaattcgagccaaatgggattacacctgacctttgtactctgagtatcctcatcaattgtttctgccatctgactcacatcacttttgctttttctgtattcgccaacattctcaagaggggttatcatccaaatgcaattaccctcaacacactcatcaaaggcctctgtttttgtggggagattaaaagagcactgcactttcacgataaggtcgtagctcaagggttccagttggaccaagtcagttatgggacattgatcaatggtttgtgcaaagcaggagagacaaaggctgtcgcacggttactgaggaagctggaaggacactcggttaaacctgatttggtaatgtacactacaataattcattgcttatgcaaaaataaactcctaggagatgcctgtgatttgtactctgagatgattgttaagggaatttccccgaatgttttcacctacactactctgatccatggcttttgcatcatgggtaatttgaaagaagcattttccttgttgaatgaaatgaaattgaaaaacatcaacccggatgtttatacctttaacatattgattgatgcattagcaaaggaaggtaagatgaaagaagcattttccttgacgaatgaaatgaaattgaaaaacatcaacccagatgtttatacctttagcatattgattgatgcattaggcaaggaaggtaagatgaaagaagcattttccttgttgaatgaaatgaaattgaaaaacatcaaccccagtgtttgtacctttaacatattgattgatgcattaggcaaggaaggtaagatgaaagaagctaaaattgtgttagctatgatgatgaaagcatgtattaagcctaatgttgttacttataattctctaatagatggatacttcttggttaatgaagtaaaacacgcaaagtatgtattccattctatggctcaaaggggagtgacacctgatgttcagtgttatactatcatgattgatgggttatgtaagaaaaaaatggtagatgaagctatgagtctctttgaagaaatgaaacacaaaaatatgtttcctaatattgtgacttatacttctcttattgatggtctgtgcaaaaatcatcatctagagagggcaattgcattatgcaagaaaatgaaagagcagggaattcagccaaatgtatactcatacacaatacttcttgatgcactgtgcaagggtggaagacttgagaatgcaaagcagtttttccagcatcttttggttaaaggctatcatctgaatgttcggacatataatgttatgatcaatgggctttgtaaagcgggcctgtttggtgatgtgatggatttgaagtcaaaaatggaaggcaaaggttgcatgcccaatgctataacttttaaaacaattatttgtgccctacttgaaaaagatgaaaatgataaggcagagaaattcctccgagaaatgattgctagaggcctactgaaagtgtaaaactagatgcgatggtttccaattattattgaataaatagttcattcataacaacaaatattcaaccgttcattttttctgatttatatatactttttatacccattcccatttgcttatagatacaatcctgtacatatgactcaacttcactagtctacttgtggtatttttgtttgcattttccctttcaattttgatttgcatgtgagctttgggttaatttaccatcagtttactttcttctcttattttactaggatatttttttatcattctgcatgtgttcaacacatagttcaacaaatttttttaaagctttgccagtgcccacttcattttttttgtcagactctatcattgatatgatgaaaactgtgcattgtattgctttggcaatatcttataaaactacaagctgagtgtttgtatttggtacttgtttataaatgccatttctaggagcatagcattgaggatttgatggttaactttgcatatattcaataaccataatcagttgttgtttacaatcaaaatcattgtgttgagtgtcagtaaatttttcactttgtgaggaatgtttgaattcatttatcatgtggtgcatccaaccaatttgcgctttaagctacctagctttgtgagctgaggaaggggctttgattaggtcgggatttcattgtcagttcctgacaattcactttgcaaggaatgtgctaatttcattgtcaatagacccacagtcttggggcatgagtctggtaatattgtagatgatattgcactgaatcagttggctttgtagcctggaatcagttgcccaagatgccatttctataaagttggctgcaataatccctgtcccctgatagaatcttcattctacttcctctgcataaaccacagttcttgtgccaataaggtaatttttttttttaccacacacggaaccttactatgcctttaaatgttgcctaaagttaacttatttctaaatgatgtccataaagaagtttgaggttcaatatactgttgtttgtagccttggcatatcctatggcatgtttttatgatgctgttgaggagcatgttggtaagaaatgccatgatgggcatgttgatgttgatgatggtgaagaccagaatgattttgtggacattttgctttcgattcaagagactaacaccacagatttccagattgatagaacattcgtcaagactttggtcatggtaagaagatctatcttagtaatgtattctttaaaacctattttttaacatttcttattgatttaaattaatgtggatttcactaattagaggtgaaattcattcaagaagtgtaacccacttagttagtgaaatccaggtgaatttcatctaatacaaaaagtatgtaaagactaaagagcattggaaaattaaagaatgtgttgataacatttttctttctatattatctctgccactttggtacagaaattaaggtaatcaaatgactagaaaagtctcgtggcaattgcatctccatataatacagtgcattattatatttttatgtgttatttttatttgtaataattcagttgttatttgcaactatgaagccatgtttttccaccctgcattgtagtatattctgataggacatagttaatgcttgggcaatttcaactgacccttcatattgggaccaacctctagagtttcaaccagggagattcttgaagagttcattggatatcaaaggacatgatttcgaattgatccgatttggagctagaagaaggggttgtccaggaataggctttgccatggctttgaatgaggtagtccttgcaaacattgtgcaccagttttattgggcagtgcctggtggagtggtggagggaacagacactgaatatgtttgaaactactggattgattattcacaaaaagttaacctcttgttgcattttcatcaccttatgtgtaacaatattttttttaactaaaagaattgaacttactactagaagtttactacaactcatgcacattgctcaaaacatttataataattcatgcaaattgttcaatcaactgaactagatctattggttcatgtgtaactaattaagaagtgtagcgttttcaaaatctttctgatatctatcgattatgccaaactttgtcggttttcttattagagatatttaactattttttcttctcacgtaaaagatctggagtattattctcaaaatctttccagccattttgttgtgaccaatgatacaaatgctagattaactttagctccaaggaatttttggtttggcccagagccaatgaaatggagttaaaagggcatgaggtagaaattgtttatgacctcaattgcaataacagttggagacaatttggattttggactcctcttttgcctagtttaattgttatatctcacacaaaacagcacaaaaaaatgaaaatgaaacatatacatttcaatccacagaccccagagtaatcgcaatcgttatccccaggagtagtactgataaactctgtcggcaatcagtggcggagtcaaaaaaaataatggaggggccaaaatagtttttataccatttttatactcttgtttattatttaataaaaaaataaattatatatatataatctttatgaaaaatatacccaaaacgtcaagttttttgcacaaaactaaatttgtaagaatacgttaaaagagacttttctatgaatttttcattgaatccaagaaaataatcgtatttttgataaaattataacaaatttgtttaattttttagaagaattggcaaaaaaaagtcccacaattcataaaaaaaatacataaaaatttacaagaaaaattgcaaaaccaatcacataaattttaataactatatataagaaagtattaagaaagaattattcttattatgagaaagtagaactataaatataaaactaaaactataataattgatgatcaaaattaaaagttagttaatgatttcataactaaataaaagattcacatatatttttcttttattctttaccattctaactatttatatttataattattatttttcatagtaataacaataataaaagaattacacattatttataattattatttttcataagaaaaaaatactatttataacgagtgtcttttaattgtcaaaattatacgaccttttatttataacaaattttttctttgttgttttcaatttttttaataagaatttactttaaaaaatcacaaccgtttatttcacttttggtgcaatttgtttgtttagttctcttaacaaataacacgactcttttcataataaaagaattgcatttgatcctcacacacaccgtcttttaagaaaagtttggttctatagttgctcgtgagccttaaattagtttattcaaatgtgcatgaacgaagagccaaatattttttgttatttggatttttatatcattgtatgattaaatcttcttaacacacatgtataatttttttaagaaaagtttgggcattgttattttctcgtgattagcacctcgaagaagtggatgagctcaacgacaatgaggttctcttttgagcgcaactacgaggttcccttcgagtgcaaacacaatggtaacatccaggttacctacgactacgagtgcaaaggcaaaatgtctcgttgccgatgcgagaagatagtgaactcttggtgtttggttactaagaaacggataaaaatatagttacaatattgaattgtaaaagagaactttattattttttctttccgaaccataagataagatcatgttgaatattattatcttaaagttgtttgctcggttgttcagaagtctccatgcatgggattgaatttattgtatgcattactattatcatatgttgcatcgttttgtgtgatcaattgttaaaccacaggacgaataacacgctcaatttgttttgattaataacaaacaaaattaaagaataatttttttaaaagtaaaagcaatatgaattttaagacgaaagacgatagacaatttcatatcatcttatgattagatgatgcaaatactatacgcttttaatattttatattgatcttatctttgattctatattctttgcaaaagacatttaatgatcccaacaaccatgttctctgactcttagaaggtcttagatgaaggaagatatagaagcaaatggaagacatatgaaacaatgattatctcttgatgtgtacctaaatatatattagagacctctgcacaagaagaacaaagaacattgctgaacttactaagatttcttaagccttctttatgccttagtgaaaattctttgagagaaaaatcttgtacttcatttgtatatccctttgatatgacaatagtattgtgagacttactttaattttaaccaacttattagtgattttggtagaagctgaagagactttgattcaaagaatacctagcgtgtttccttagagagacatctataaactcttcttagagggtcatgatcagattagtaaggttgagaatatgtgattcaattttttaacaaaatttgtcctctacagtcgactacttgaaaaaatgggtcatatgggaatggttaaaatttatagttcctttgaggttggcttctgtgacatgaaattattgttccaaattttgattgaatttactaggagtgatatagaatatttgtaatggatgaaaaatcgttccttaattttttatgagttgaaccgagataagagtaactaggaactattctgaaaaccactggtaatcagtgtttcagacatgtaattccctaagcttggtgtgataattgatgcacctatgtttgttaagaaattggtccatgagtgcgtgtgagtgttgattcaagaaaggagtatgtggggcttcaaattttgagcaatcccatggaagatggaacaatcacaaagtgatctttgagagaagataattaaagtatattgtgctctagttgtggccgaaggtagaaagttgggtccggttcaacctgtgttgggcagtgttggagtttgtcttaagggagaaaaaaaaggatttttctatttacactttccacatttactaaaagcactcccttttccttttttatttaaatttacctaaataatctttcttttttgtcttttttgaaagatcacctcacctaaatttcaaggacgaatttgtctacaatttgatgaatacagcaagccaagaataccttgtctcagctctgaaaatagtcgtgaacgtgaggcttaatgcaagctcccattgtctatgaattgcatcttttactttggagttgggcattgaaaattttggcagcccagtataataaaaagtcattttagggattgtgaaaggacacgaaaccattaggtaatgattaccctaattaagttggggattagagtcaggtttttctattattcttcctctctctagggcatgttcctatcttttctttgaccttctccatggtcatgtttgagtagtcatcttgtttaagattgggcatagccttttgatgtttttaatggatttctaatggtctttatttttatatgcaaagtttgttttcctctcattagttgattctgtttttagagtgcttaattgaatgaattgatcgattttttattttgcataaccttagatgttggatgactgacatgagatagaacatttagtcacaagttataaattttttagttatagatatatttaaatttaagttgttgataatcaaataaataatttagaggttattatttgtgtacgtattctacatgtctctcttgtacacccataattaaacttaaataaaatcttaattattctattttctaaaataatatacataactattaatttaactgttacattgatcttttttttttttcttttgtcgtgatcacttaccattctttttaatctatctattaaatttaacttcagctaattatcagttatagtatacaagcaaataattcatcttcttaaagccttgactatataaccggaaccacatcatatgctcatccaaaatcagttttgatgcttttattttgctcagccatgacagcacaccatgaccctgagaacaaccccctgaaaccacaaggtcgctccctatttaaaccaaacaagcatatataaataaagagtaaccttgctgacagataaatgttaataaaaataagtgaattttaacataaaaaatatttgtttatttatttattgaatgattctttaaccaacaactttaagacacagatttgaaaaattcttcaaatatttgctaaacaaaaatataaaggattttgttaatcggatttagcaaagaaaataagaatattttaaaaaataaaatagttttcaagcattaattgaaaagtcaatactaagtaatattgtatttatagtaaattcgttacatatgtatttttttcttattatcaatttaattattaatttttatctcaatattatatatgatttgctaatacacttttattttttaaaaatcatgcttataactcacaacttgaaggaagaatttcaaacatatcccgtcacaagaaattttatattccaaaaagtataatttaacattatcattttctcaaataaattaaacatacaatcatatttattatttattttcttttttacttcttgtaaaaaatattaaaagtttcatccactaatcaatatttttattaaaaaaaataaaattcattttaccacaacaaatatcataacatgaatcagttgaagaattaattataattaaaagtccaaagtcacaagtgttcaacaagttaaaggtgtatcttcattatctaattaaaaaataaatcaaatctcaagaaattcattgagaaaaaggtaaataaataactgtcacaagtcgacgtctaaaattataattatctaagaagtcaaaagatacatattcattataaaaaaaaaggtccattaaaaaaatgtgaaaaaacaatcttgtgataagtaaaagttcaaacctactatcatccaagaaatcaaaagaaacatattcatccttaaagtttactcgagtaagatcattctcaaaatttattggagtaagacgagtaaacaaacttactttaaaatttaaaaaaaaacacaaaataaaataaaattcaataataagtcactaaaaaaggaaataaatataaaaaatatatttaaacaaacaattttaaatattttattagcatcaattttatgttgtctaccatgattttctaatcctaaaaggaaaccaaatccctaatggttcgtacttagtaggcctaaaggatagatagtaaatggcaatatgttcctttatctaatgcgaattacatcgacgccgccgacccagagtttcatacttcatctattttctatactctctttccttttccatttccaatgccatctttctctttcttaagaacattcaggctctctctttttccgccttatcccccaattgcaactgcaaccctccattctcaatctcattctcaacctcactctcaccatcatcaccatcatgctgttgcctcattcaatcgcatgcttcttatgcgccctcccccacccaccttccattttgacaacattctgagttcccttgtcaagaacaagcattatctcactgtcatttccctttttaaacaattccaatcaaatggggttacacctaacctttgtactctgaacatcctcataaactgtttttgccatctggctcacatcacttttgctttttctgtattcgccaacattctcaagaggggttatcatccggatgcaattaccctcaacacactcatcaaaggcctctgtttttgtggggagattaaaagagcactgtactttcacgataaggtcgtagctcaagggttccagttggaccaagtcagttatgggacattgatcaatggtttgtgcaaagcaggagagacaaaggctgtcgcacggttactgaggaagctggaaggacactcggttaaacctgatgtggtaatgtacactacaataattcattgcttatgcaaaaataaacgcgtaggagatgcctgtgatttgtactctgagatgattgttaagggaatttccccgaatgttttcacctacaatactctgatctatggcttttgcatcatgggtaatttgaaagaagcattttccttgttgaatgaaatgaaattgaaaaacatcaacccggatgtttatacctttaacatattgattgatgcattaggaaaggaaggtaagatgaaagaagcatcttccttgatgaatgaaatgatattgaaaaacatcaacccggatgtttatacctttaacatattgattgatgcattaggcaaggaaggtaagatgaaagaagcattttccttgttgaatgaaatgaaattgaaaaacatcaaccccagtgtttgtacctttaacatattgattgatgcattaggcaaggaaggtaagatgaaagaagctaaaattgtgttagctatgatgatgaaagcatgtattaagcctaatgttgttacttataattctctaatagatggatacttcttggttaatgaagtaaaacacgcaaagtatgtattccattctatggctcaaaggggagtgacacctgatgttcagtgctatactatcatgattaatgggttatgtaagaaaaaaatggtagatgaagctattagtctctttgaagaaatgaaacacaaaaatatgtttcctaatattgtgacttatacttcacttattgatggtctgtgcaaaaatcatcatctggagagggcaattgcattatgcaagaaaatgaaagagcagggaattcagccagatgtatactcatacacaatacttcttgatgcactgtgcaagggtggaagacttgagaatgcaaagcagtttttccagcatcttttggttaaaggctatcatctgaatgttcggacatataatgttatgatcaatgggctttgtaaagcgggcctgtttggtgatgtgatggatttgaagtcaaaaatggaaggcaaaggttgcatgcccgatgctataacttttaaaacaattatttgtgccctatttgaaaaagatgaaaatgataaggcagagaaattcctccgagaaatgattgctagaggcctactggaagtgtaaaactagatgcgatggtttccaattattattgaataaatagttcattcataacaacaaatattcaaccgttcattttttctgatttatataaactttttatacccattcccatttgcttatagatacaatcctgtacatatgactcaacttcactagtctacttgtggtatttttatttgcattttccctttcaattttgatttgcatgtgagctttgggttaatttaccatcagtttgctttcttctcttattttactaggatatttttttatcattctgcatgtgttgattgtgttcaacacatagttcaacaaattttttaaagctttgccagttcccacttcattttttttatcagactctatcattgataggatgaaaattgtgcattgtattgctttggcaatatcttatagaactacaagctgagagtttgtatttggtacttgtttataaatgccattgccaggagcatggcaacgaggatatgatggttaactttgcatatattcaataaccataatcagtttttgtttacaatcaaaatcattgtattgagtgtcactaaatttttcactttgcgaagaatgtttgaattcatttatcatgtggtgcatccaaccaatttgcgctttaagctacctagctttgtgagctgaggaacgggctttgattaggtaaggatttcattgtcagttcctgacaattcactttgcaaggaatgtgctaatttcattgtcaatagacccacagtcttggggcatgagtcttgtgaaattgtagatgatgttgcactgaatcagttggctttgtagcctggaatcagttgcccaagatgccatttctataaagttggctgcaataatccctgtcccctgatagaatcttcattctacttcctctgcataaaccacagttcttgtgccaataaggtaagtcttttttaccacacaaggaaccttactatgcctttaaatgttgcctaaagttaacttatttctaaatgaagtccataaagaagtgtgaggttcaatatactgttgtttgtagccttgacatatcctatggcatgcttttatgatgaagctgttgaggagcatgttggtaagaaatgccatgatgggcatggtgatgttgatgatggtgaagaccagaatgattttgtggacattttgctttcgattcaagagactaacaccacagatttccagattgatagagcattcgtcaagactttggtcatggtaagaagatctatcttagtaatgtattctttaaaacctatttttttatcatttcttattgatttaaattaatgtggatttcactagttagaggtgaaattcattcaagaagtgtaacccactttctgaaatccaggtgaatttcatctaatacaaaaagtatgtaaagactaaagagcattagaaaattaaagaatgtattgataacatttttctttctatattatctctgccactttggtacagaaattaaggtaatcaaatgactagaaaagtctcgtggcaattgcatctccatataatacagtgcattattatatttttatgtgttatttttatttgtaataattcggttgttatttgcaactatgaagccatgtttctccaccctgcattgtagtatattctgataggacatagttaatgcttgggcaatttcaactgacccttcatattgggaccaacctctagagtttcaaccagggagattcttgaagagttcattggatatcaaaggacatgatttcgaattgatccgatttggagctagaagaaggggttgtccaggaataggctttgccatggctttgaatgaggtagtccttgcaaacattgtgcaccagttttattgggcagtgcctggtgtagtggtggagggaacagacattggatatgtttgaaactactggattgattgttcacaaaaagttaacctcttgtgacattttcatcaccttatgtgtaacaatattttttttaactaaaagaattgaacttactactagaagtttactacaactgatgctcattgctcaaaacatttataataattcatgcaaattgttcaatcaactgaattagatctcttggttcatgtgtaactaattaagaagtgtagtgttttcaaaatctttctgatatctatcaattatgtcaaactttgtcgattttcttgttagagatatttaactattttttctactcacgtaaaagatctggagtattattctcaaaatctttccagccattttgttgtgaccaatgatacaaatgttagattaacttcagctccaaggaattttccgtttggcccaaagccaatgaaatggagttagaagggcatgaggtagaaattgtttatgacctcaattgcaataacagttggagacaatttggattttggacacctcttttgcctagtttaattgctatatctcacacaaaatagcacaaaaaaatgaaaattaaacatagacatttcaatccacagatcccagagtaatcgcaaccgttatcctcacaaaaatgtactatttataacgagtgtctttcaatcgtcaaaattacacgaccttttatttgtaacaaattttttctttgttgttttcaattttttttaataagaatttactttaaaaaatcacattcgtttattttacttttgtttcaatttgtttgtttagttctcttaacaaataacacgattcttttcataataaaagaattacatttcatcctcccacacacagtcttttaagaaaagtttggttctgtagttgctcgtgagccttagattaatttattcaaattgtgcatgaacgaagattcaaatattttttgttatttgaatttttatatcattgtatgattaaatcttcttaacgcacatgtataacttttttaagaaaagtttgggcattgttattttctcgtgattggcacctcgaagaagtggataagctcaacgacaatgaggttctctttaagctcaacaacgaggatccctttgagtgcaaacacaatggtaacatctaggttacctacgactaagagtgcagagacaaaatgttgtgttgtcaatgcgagaagatggtgaactcttggtgtttagttactaagaaactgatagaaatatggttacaatattaaattgtaaaggagaactttactttttctttccgaatcataagataagatcatgttgaatcttattatcttaaagctgtttgctcagttgttcagaagtctccatgcatgggattgaatttattgcatgcatgactattatcatatgttgcatcgttttgtgtgactattaaaccacaggacaaataacaccctcaatttgtactgattaataataaacaaaattaaagaataattttcttaaaagtaaaagcaatatgaattttaagatgaaagacgatagataatttcatatcatcttatgattagatgatgcaaatacgcttttaatattttatattgatcttatcttttattctacattctttgtaaaagacatttaatgatcccaatcgcaaccattttctctcctagaatgtgttaaatgaaggaagatatagaagcaaatggaagacatacgaaacaatgattatctcttgatgtgtacctaaatatatattaaagacctctgcacaagaagaacaaagaacattgctgaacttactaagatttcttaagccttctttatgccttagtgaaaattctttgagagaaaaatcttgtacttcatttgtatattcatttgatatgactagtattgtgagacttacttttgattaaccaacttattagtgattttggtataagctgaagagacattgattcaaagaatacctagggtgtttccttgcagagacatatgtaaagtcttcttggagggtcatgagattagtaaggttgagaatatgtgattcagttttttttacaaaatttgtcctctatagtcgactacttgaaaaactgtgcaatgagaatggttaaaatttgtagtttctttgaggttggcttctgtgtcatgaaattattgttccacattttgattgaatttactaggtgtgatataacatatttgtaatggatgaaaaattgctccttggtttttgatgagttgatccgagataagagtaactagaaactattctgaagtgctctttggagaaaataattaaagtatatcgtgctctagttgtggccaaaggtagaaagttgggtccggttcaaactgcgttgggctgtgttgaaatttatcttaatggagaaaaaggaatatttctatttacacttccaacatttactaaaaaacctcccttttcctttttatttaaatttaccaaaataatctttcttttttgtcttttttgaaagatcacctcacctaaatttcaaggacaaatttgtctacaatttgatgaatacaccaagccaagaataccttgtctcagctctgaaaatattcataaacgtgaggcttaatgcaagctcccattgtctatgaattgcatcttttactttggagttgggcattgaaaattttagcagcccagtataataacaagccattttagggattgtgaaaggacaggaagtcgttaggtagtgatgaccctaattaagctggggattagaattaggtttttctattattcttcctctctctagggcatgttcttatcttttctttgaccttctccatggtcatgtttgagtagtcatcttgtttaagattgggtatagccttttgatgtttttaatggatttctaatggtctttatttttatatgcaaagtttgttttcttctcatcagttgattcttttcttattgtgcttaattaaatgaattggtcgattttctattttgtctaaccttagatgttggattactcacataagatagaacaattagttacaagttataaattttttagttacatatatatttaaatttaagttagtgataatttaataaataatttagaggttgttattctttgtacgtattctacatatctctctcttgtacacttataattaaactttgaataaaatcttaattattctattttttaaaaaaataatacacataaccagtcatttaaccgttttaacttcagctaattatcaattaccatatacaagcaaataattcatcttcttaaagccttgactatatataactgagaccacgtcatgtccttcatccaaaatcaagtttgatgtttttatttttctcagcaaaaataaaatagatattaataatagaaaaggtattggatataccaataatagaggacaaggttagccatgacagcacaccatgaccctgagaacaaccccctgaaaccacaaggtcgctcactcgctccctatttaaaccaaacaagcatatataaataaagagtaaccttggtgatagataaatattgataaaaataagtgaattttaattaaaaaaatatttatttatttattgaatgattctttaaccaaccactttaaaacattgattactaaaattcttcaaatttttgttaaacaaaaatataaaggattttgttaatcggatttagcaaataaaataagaatattttagaaaataaaatagttttcaaacatcaattgaaaagtcaatactaagtaatattgtattaattgtaaattcgttacatatgtatttttttattattatgaatttaattattaatttttaatcaataattaaaatatatttttccatctatttcttactttagaaaacaaatactctaaggataatattaatttactcaattagcaccttaattaaattattttaaaataaacgttaaatatttccatgacattattttttttcttctctttttatttgtttcttaacacaaatttaattttatttattaatgtttaaaattttcagataatgttaattattatcacttttgttatatctatataaaaaaagataataatatgcacatatacatacataatatcaaaataatacattaaaatagtggattcttgtttttcgtaatctacgaattataatcttaaataaaagaagaacaataagagtttaatagtcttgtatttttaacataaaatattttacatttatcatgtagatataatttttaagataattggtataagttaacaaattggtttgtaattaagttacagtataaaaattgttttatgttatatgtagtaggtacacagtctcgtaaaaaatagaaaaatcattttaatataaagtatagtccccaaaatatctccctctcactctcatgattgtcagagatattttgtaacttttgcagatttgaattcaaccctacgcactcgaatatcaaatccgttcgctactcgcgtttctattgataaattatgatgctttaaaaaacactttttcactgtttaaaatgttatttaaatgttttaaagacaaaaaaaaaaattataagactaaaattaaaaataaaagtttataagtaaaaaaaaaatactaaattacaaaaagacaaaaatgtatttaaatctaatttatatttaatttttcacaaacagaatgtagtaatatttaacttaacataatcttcaattcttttactttttcttcttgatcgaacgacattatagcatataatcaaatatacactaatttagttaaataatcatgggcttatttattattaaacaatatatcatttgcagtaaaaaaaaagaagaagaagaaagaaaacaaacaatatatcattcaacgagaatattaaaatatcttttctatagatagcacttttgataaattatatatatatatatatatatatatatatatatatatatatatatatgtatatatgtatatatatattagcttcataagtttatcacgtgcgctataatttaatttggattaacttttgagatttttaatcataagttttctccattaaatattttcctagacaactattacatttacttggaattttattttctgctttcattttttgattttacttttaattataaaactgccatattatttttgtttagttttctgttttcaaaaagaattatacaggaaacacggaaaacattttatttttgttttctctttttcataattatacacaaaataatacatgctatttctaggatttaatattaggatttaaaaatttacataatttaactaatatatttttaaattttaaatatttcaatgtaaatattttatttaaaaaaatttcaattaaaactacattgtatatatacgtgtccgctaataaggataaaatattaaaatataccaaatatcatgatattttttcagagtaaaacaaggacaacttaaagtgcagttctttacttgttttctgtggataatatgtaaattgtgttaaaaataacataagtaattgaaacaaaattttaagtggagaactagtcagctaatggtattgttaaaaaattataaattttaatgtaccatatttctaaattaagagagattcattaaataaaatatatctttaactatgctgatgagaaacaaaatattacttcaatagattaaaaaataaactcatattttataaaaatatagatttgatatctactgtgatctaagaaatttagaaataatatgtaaatatctttttataagtatttattgagtattgaaatctgttatcaaccaaatacacttgatcctttaacccatcgaaaccctctcttcagacatcattaaaacaacctcactctcctcctaggaatccccgaagaaactacgagcgccaccgcagcatcggttcctccacccaccgcgatggcgcaggtgccggcgagcgaagcgacggcgttctggacggacgagaagcacgtgcacttcctcaactccatggaagcctccttcgtccgcacaatgctccaaaaccaaggcaactccgtctccaccacgcgccactctctgccactcgaccgttacctccccgactcttccgaatccaccttggatttgaaaccaaaccctcgccgccgcaccataaaacaccatgcaccctcaggtacgtgatcgcagcccccctcacaccgttattattgttgctttgggttttgatactttgagcgaacaaattgttggggctgagggtgttgataatgataataaggcagcgtttgggtgcacattaatattgttttctgatttggcgtttgatgaaaacgggtgctggcggtgaaccggttttgttttattggtggacactgtttgactatctaaagtcttaaaccaaacagcacgtaagtggaccgtcgaaagcatcaaatatgccccttagatatttgtagacagtaactacttctttttccttcctttcggatctcctcactcctctctctaccataaagccaatttttatttttcaattcttatatcaaaaatcaaaatactacactatacactattcaaaaaataacgaaaatttattacaacattcatacttttttttatctatgaacaaaaagggttttccattttcacatgttgttggttaaacattcaattattacactaagaataataatgtgcattgtaattgtttttttaagatatgtgcaatataattaagaatctataattttatttatataaacatagatatatattacaccgtccggtagtagtataatatcttgtagcaatgattttttaataccctatataaattttcaaacacccaattatctttctttatttttctctatttcttttttcctaccacattagtattcattatactcatgtttctctctctctttttcttttactggacttcacataacagttaatgggtggtgtctaacaatcattataatatcttatgtcgttagtataactaaatacgggattgcatgtaagagaatatataattaaataaaaattatatttacagaaaaaaaaattaaaagataagatatattagtcacatgtttagtttagtttaatcagtttaattgtagagacatgatcgttaagatattatttctcaaaatttaaagtgtttattcaggtagttgacagaaaaaaaatctttggaattttatcatgtattttattttatgaaaaaatatttgaaattttatagccatgtttttcaatgtattcttttttatgaaaaagatctcacacgatccacttcagttttgggtccctgttataattttaaagaaagttcactttttgaccaacgttttttttttctttttctagtaattcttataattaatttgggggctgtttcttgaaatagattcaatgggtccaacaaccagaagaacaaggaggagatcatctcagccctacaattcgtcacaggaccaggtgtggagatgaaatattctagagtgtttccaaccgttggatcatgataatgatccaacggacaaaagcatcactttttatcataagctatgttggttccaaaacatacgacaccgtattaattaaccaaacacgtacctacatgtggaaagatcttaaatacaaggaatactcctcacaacacatgttttactcgatcttgtgctgtacaataatgcattgttcgaattactatattaaacaagagaaagatatttagacatagatatatgtattatggatcaggaaaaggactaatgtgttatttccacgtgtcctccatacaggcggtcccacaagtagaaaacgaaagagaaggtgcagcatgcaattgggacgatgataaaagagcagaaaattaatgtttagtgtacctttttccaccaacctccctacccctctttcatttttattctgcccagttcttttatttttaccatttatttgtactttatcttcttcccaaaatttgtctcctctagtatatagtatgtagtatttggtctttttcgatctttttctcaaattcgtgtcatgtaagggttttttttttttaaatatcgaagtgttggcatttaactacctttcatttatttagagctttgtgtgggggtattatttgattattaagttgaatttagctagccgctaaaatcttctacacaaatgagaagatattaagaaaatgtgtacattaaaagcttctactctaggcagcactggcatgatgtcattcctacctaccagatgccattatctaagctgtgctcgatatatcttttatttcattgcatcagtgtcaacataatttctttttttcttattttggcaaattaaagaaagcaagctttaggtagatgctttggataggagatattttatgaaagttctagctaggaatatcatatcaacattatttgatagaggtgtggggggagaacagtagaagaatattaaattaagtgaacttctatgatattttcatagctgtgtatatcatatcatgcaactattaataattagtggaaaagtctttaatagctaattgaaaattaaatatgtttagtatggttttagaataattatatatataaaaatcaataaatttacgattgatagcatgtcatgattggatgatatatatattataaaaaaatattctatatgtacatatactttttctctaattaatgttagagtaattttaatgcaacaataataaattatatcattagttaataaaaaaatcatgattaatatgatttttaaaatagttatgataaaaaataataaatttatgaatatataaaattataaactgttaatattatacaggacacgtgaatgtatgggttgtgattagtacgaaggtggattagacagggacatgagaggagtttccaaccttatccgtatgaatatgttggtagtagtggatggttggtaagtgttttcaaatcaaaattccgtgatccatactgtatactcttctcttcttttagaattgttccatctcatcgccaactttgcatcattgctcctcatgtgaagtcatattcgtccattcattgatgaaattttaatatttatgtgcttctgaaaatctgtgtaattcgattggtttatatatatatatatatagtagctagttatcttcaagctagtggtagtagaagttgaaaattaagtgtttacttggtttgtatactataatagaattgattaattaatctgttaaatgtgattgagatgctgcatgtcttaattttcctctatattatttcaaatcgaaatgataaagaataattcgtagcaattaaaagcattacgaaacacgaacaccttttgtgtactctttctttttcttattatttatttgataagaaataaatggttttacaatgtcttcatactactttcatcactgtcccgtttaggccaaatatcagttatttaaaaagaataaaatatccgatattgattagtggaggatcgttttatcttaatttgtggttcaatttcgaatttaaagactgcagttgtgttaaaatttgagagttctattgttcttaattatcttacgtacttgagtttgaatagaagttcttaaagatatctggtgaattaatattaaagaagtgtttaaaaaagtgttggatttaaaaatatgaagttactaatattttgataaaggatgatggtttgtatgcaaatgtgaggactgccatcatcaataatgttgaaagtagtccgatgtcatgtcacattataagtattcaaatactgggttaaatgtatttttttgtgcttatttttttttattttagtttctgtaaaacaaaagtccttaggattcgtatttttttctcattgatcattgtgattaaaaaatattagtgaaaactaaaaaagaattctaggaactaaaaatgaaatagtcacatatttataagacaaaaaaaaaattaaatcttaaattaaaaattaatataaaataaatactcaaatacgtaatatcatattttcaaaattacaaacgttcaacttgatattttttatgttataggttaatatttaaggcataatctatcttgtttgaagatataacttattctaaaagtttttacgtacataaacttgattcacgacaagttttataaaattacaattttgagtcataattgaaagaataagaagaaattgtttagaaggctcccctgtcataaggttgctccagccctggagggagaggaattgtcctaacatatgagagaatgagagagataaagccagaatgtgcgtgaaatatgaagaataatgaatatctaatcgggggctaaatggtaataaaaaataatataagtgttaaatgataataattggttcggttaggttcttcaagttttgtacacccaaacctaatacttaaactaaataaaaatatcaggtttgttgttttttaatttgaatctagaaaatgattcagatcaatttgtatgttttccttcgatttgattaaaatttattgggtcattggaatgatgtggacctatatccaccctaatatacaccctaacatcttttttattttttaatttccaaaatactatctatacactcttggaatttcaagtttcaaaagaaaaaaaaaataccaaaaatttagagttccagaagtataagtttgggtatacatcattttataattttgaaaaaacattaattcccgggcttagagatctaaaatcacattcttatctaattttataattttcaattgataaagaaatgtgtgttagaaactagaaagagtgtttgctatttttttttatttgtatgattttatcttttaaaacttcggacttctagaactataattacccttcagaaagttcaatttccagctagaaattaaaaattcaatttcagaatttggaattctgaaattgcaaaatggctgggatgttaaaaaaaataaacaaaaagtaatatctttaataagaataagaatacagttaataaaccaatctcaggcaccaataaaaaaaatgagaaaacaggtcggtaatggaaacacaggaagcaaaacttaccttcaatggcatcaatggtacaagctacctttaattacacatgaaaatagcttcctccaatggccattaattgttgttggcgaggtggagggcaacggggcgaccagagtgaggtagagttgaggtgtagatgataacagcgaaatataaactaatttgatgattaatttggattaataagtgggtttaatttctttattttattattatttttaatgaaataataaataaattaatatttttgttattttttattggtaaaattcaaaagaagaagatttcaaatactttagagaaaaaattgatacaaaaacgggaagaaaaaatttgaaagaactgaaaaacccgcttagcgtgcactctcgctcactgcgcaacacacgcttaatgctaaaaaggtcgatgaagaagcccaaaggcatgcttagcacgaaagctcgaagtcaatgtgaaaattaaactacctagtgcctatataaggagcaggaagtaaaagaaaaaagacataaagttttagagagaacccacacactgggtctatcccttaggggaaattctctctctttagtcattcatcatcttcttccatccacatcaacccccaaaagtgtaaaagtttctcatgacaatgagaggctaaaccccccttagttagagcctagaaggcctgaaaagccaatatatgtattgtaatgcttcatatctatcaatgcaatcaggtgttttctttcctattatcctttcttattttaatttcatgtatcattcattcttgcatcatctttagggattagtcgttcggcagacgataattcttaatagaaatacaaggaagttcttacatgcattagttttcaggattattcatagggaaatggtaatgtctaaagaactgagaaatgacatctcaacattgcattgctagagataaggtgactttgttgtgtctttgcatgcataatttttatacttaatattgttaaagagatttgggagagataatacataaattagactctttatcgtgagggatctggattgagattatgtgggtaggaaaaattcaccaaattgatagagaaaaatataaaataatacatcttaggcaaataagactgactagctcccaacattatcacattctgaatttatctttttttatcttcatcttatcttttacttttcttatcttatctttctttatcttctattttttatctttatcattttttaattcaaatattttatcttttctattttctatttttttctttaaatcgttatcttatctcctatatttctttatctcttgctttttaattgagtttgcatcaatctaggtacaaacaaaattcttttagattcgacattcggactttcgaatactttactacttgttcacaaaattgatacacttatcaatcggttaacagtagagttgaccgtttgagagacagacatgaaaggaaaaatggcacataagaaaactgaaaggaggtactaggcatttttgtccatttgggtgttttaacctttatatggggtgcaggaagcaacagcccacgcaacatcatcttaaatgagaggccgtattgctgtccaagcccaaaacaattgtgttagcccagccttaaatattttgtttgactttttttgtgataaataaacgggttttcattcccgaaacatataaatcatgcgtcaaagttcaaaggtcaaaccatctgacttcaaattttgtactactatcatattttgtgggtagaaattgaagaaaccctctcaattaagagtctggcgaagaaaaaaaagagaagtatttctgctttaaatttgctaagacctttttcctgaactcattaaaacgtgtatactccccttttgagggcattttacacatttatagaaagatcaattatatgtgatttcatgatttgagaatgcccctattttaaactacccttcagagaaaaattaacacgcacacactcacaaaaatatcttcctttcctgaaatcctactattactgtattaggcctatctctttctaaatgatggatagagtggtctacttataagttataatatagagagaaaacgataccacgaatgtccaaggtagggctaccaacaaagaataaatgtcttcgtgagtaatggttaacttattgttaacgctatggaacacaatatattagagaatggatcactttatacatctgttattcaattacacaattgattttttatgatcttccctgtaggaaaaaaaacaaaacgctttgcaattgttgtgatagagtcattgctaaattcaacagaagataatatactttaataaaagaaatgtcctaagtaaacactactgtgtatatgaattatgtaaatcttaaagttgattataaggcattaataaatcaacaatttgaagaaagttactccgatattcttaatttacagcagcaacacaaaattattatcaaaagttgaaaaattattgccaaactttcaaacttaatctattataactttttaaatttaatctaaaatatttttaagaaaaataaaatatatttaaatatttcacttaagtatcaattatatgttgtcaactattattaatatttatcttataaaatttataatttaatcatatacattaaaaaaattatttctgttactcataagtattattttgactttaaaactaacatcagttctgaagcttctcaaattcaaacattcacaccgcatgtccccacaaaaatcagcaatttatgttttactttttcgtcttgccatgctaatttgttctatcttgaggtgacatcttaccatatatgagagaaaatgggcgacagcaacagctagctagcaacagaagtcacatcctttgctggataattatattcatcgttagctcatattattgttccagaaataggataagcagataaaagctgtggctaaattggtggatgcagcacctttggaattaaagtaggggaccaaggaacaaaacttggattagtaaggatatcccacgcgtttggctggtagggattcggaagaattcgcagtttctcgaacaacattaagaaaacgatcgatgacagaatatttgaggctggcaatttggtctgatagagagaaactgtctgtggatatatatgtctttatatcttttttgtgtgtatttgtcttcaatctttgcagcatattttagttgtaacatttaaggggtatctagcataaattaagattaataaggaagggcatccaatgttctaaattgtattgtattttgcgtgtcacctattataaatctttttttctgtattcgattctcacaaatgataaaaattgtaatgtaccttaatcatccaattttgttttaaattataaaattttcttgaataaagattaaactgtagaatttctatatatatagagattaaaacgaaaggtatgtataggtatatcaatcaaattattaattaaatcttataaaaataaattgaaaaccaatatcatatcatgcatctttattattgtcaacaccatcattgttactactggttgttaccaccacaatcactaacaccactacaatcattaccattgtcatcgacatcatcatcataagtatcaacattgttactaccatcacaactatcaatattattgttattgttacggtctattgtcattattactatcactatcatcactcctatcattgttaccgtcatcactatcactaccattgtcatcaattggtgctaccaacattgttattactactagttactaccaatattattatctttgtcattgtcacctcaaacatctcatcactggtattgtcaccatcatcgccaccgatattactaccaccatcatggatatttctattgtcaccgttgttgctatcatcattactactacacaatgatactcttaaattaattttaatactatgaaattttcaaaataaatttattttaaaactaaccatattttattatttttagaaactaaaataaaaactggtcgttaattttaaaaatttgaaaactcaaaattaaaaatcacccaaagaggacctattagcatgttctaaacattaaaatcattttgccactaaactcacagctattgaatcaagagaggaaccacaatcgagacagtttttcatttctaaaaaaaatgttgagcctaaacatgccaacaagtcttcgctcatcgttcgttttcaggaagcctgaattttgttaccacattttttttctcccaatactttttgcatcccctttcttccatgcgcaggaacatgaaatcgcacgtggccatgtctggaacagctaccaattaagcagcattcgtgcttgaaaatgggttggaaacttgcagcacttaaaggaaagatctccctagtgacttaaattaattattataaagagtaataattttcaaatataaacaattcctaatagattattaattctttacactcaaatttaatttatataaaaaattaatttcctaattttgacgtacccacttaaaaaaatttgtccttatattgcaatattttgtttccaacacttgtagttcgttcactttataattgttgtcggtgttagagttttgtccctcccgttaggtagtgttagacaccattggtttcagtctcacgcgagtacatgactaagtaacagatgcttagtttgattgcatgtccacctgacttacttggttcatttgcacagcctttcctttagacagttgtctagatctatccttcttgtgttaaatatttgtaagtatttcaaaacttgagaagaaatcagttttacatttcttgaatgagaaatcattatatttgttttattctgaaatgcattttatcagaataaatttttcaataaaacaaaatattattttaatagatttttaaaacaatataatttttcaatgttgcaataattaacatataaatagaattaattattaaatatatgcaacaccccctactcttaattttttattagccaaatagaatattatgacactcactcacaaccaatcaatcatgttcatctataaccgggaaaatacttgtagggaaaaggaaaactaaagttaatcactttatatgccaaatatatacagatgcagttcaagtttcatgagaggaacggaaagtaacctacccatctctatctctcccatcatagtctgtgaggagaagtatcactgttgcttggtaagagggtgtggcattcaggtttttttttttttaatatgcttttgaaaaatcctggtgtcattttaattaatacctctcaagtctcaatagtctagagtcctaactttgtccttgcagattttatttgctaattgaatcaaaatatcttataaatgattaagacatttgtcatcgcatgagctgaatggctggcacagcttcagacatcacaccaaaatgagatgaaaccactaggtgatcaaccttataggtacaaactttcatcggccattctataaagaaaataatttataaagtatttgaaaggagaaatatgtattcacctgcatgcttttctttaaattaagacggacattaaaaggtttatgaagaaaactcatagtgaagtgaattgaatatgaatccctagttcttgcttcaatatactaaatatcagacttggttataattaagatattgagaactggtcaaattctattataatccaaatatttgcttagaacttatatatatatatatatatatatatatatatatatatatatatatatatatatatatattttgatgatgtgtgaatgtttcatataattttgataaaattataaataaatatcttgaatttttgtaatttgttccctctgttatgatatatttgatctgactatttcctaattttgtgttttaattgtaagttttgtaatttatttggtcaaattaaaatttatgaacaataattattttaattaattttttttttgtgacatttatgtagcttttgagatacatactccaacttttttttaataagcaaaaggaacatcatatattaagatagcagcaaaagtagtgccatgataaaaaataactacaaaacaagtcctttgtggctaatacaaaggaaaaaccaaccacaaagatgaaccaaaaaacagctaaaatatgcttcaaacagtcctgaagcttgaattatacaaggaacaattgcatactcaaaagattcaagctgtgaaaaggaacatcctataccaaaatatatatttctagtcagacataaccaaccagagacataaaccaagcaagcacccaactcccctagcctctaaatacagcagctagcaaccaccacaaggaccaacaccaccagccaacccgcaacagaccataaacaatccaccaaacaatcctacaagcatctgagatgctctaacttatgacgtacttttttgggtctccaatataagaattttttttgtttttttttataaatataactaagatttaactaattttattatattttatgaaattatctttaaaatatctttcatttaataaaattaaagattttttcatatttgatatcatgttccaataaaacgtaatataaaaaataaattcatttttaattaaaactcacacactttaatgaatataactaatattattaataagtatatatatatatatatatatatatatatatatatatattcttataatcaaggccgaaggaaatatatgttataggatcatgagtcacaatatatatgtgttcgagcgtgtgtttttgagaaaatagataatgattttaaaaaagttatataaattagctattattttaatatgatataataaaactacaatttataattttaaaatttatatataaaatgtttggagttttgaaccgcgtaaatagtaaaaagcacaagttcagttcaattcgattttgttcgaaacatatcttcaatcattacatagaattttattgaatttaaatatctgatttcccactcagatttctaataaaaaggaaaaggtttctttttataaaatatcaggtcagccttgctattattgtcaaaataaaaaaagacaacaactcagctttatcactttatctaaaaaataaaaaataaagataaacagaagtatgattttttttttctttttagaaaaaaaaataagtttcttaaataaagaagaaccgtagaagctatctttggttacttaccagttaccatcatatccaagagtttcacccatcaacatgcaaacaaatacggttattattttattaaacaaaaaaaaaaaacaaatccgtcattcacacggaactttctcgacataagatgtaacgcagtaccttctttccccttcctttctattttttctcctaactctctctctctctctctcatccttatatttccaacggaaccttctagaaccaccataacatcattctccgttccctcgcgtttcaacaccgataacccgcaaaaatacccattgatctgcgcctcctcttccatggctccaccgccgccggtggaacacaacggcgactccgccgctaccgcctccgcctccgcctccgcggagtctcagagatcaattcccacgccctttctcaccaaaacctatcaactcgtcgacgaccaatccatcgacgacgttatttcctggaacgacgacgggtcaacgtttatcgtctggaaccctaccgttttcgccagagacttgcttcctaaatttttcaaacacaataatttctctagcttcgttcgccaactcaacacttacgtaattatttcaattcaactctttgttttgtttttttttttttttttttgcttaggtttcgatgattttgaattttatttctaaaatttgtttataattttgcttgatttgcagggattcaggaaagttgtgcctgatcggtgggagttctcgaacgattatttccgccgaggcgagaagcggcttctttgcgaaattcagcggcggaagatctcatcgccggcgccgtctccgactgcgccgacgacggttacggtgccgatgccgttgaccgcgataccgatcatatcgccgtcgaactctggcgaggagcaggtgatatcgtcgaactcgtcgccgttgcgagcgccggcggagcttctcgacgagaacgagcggcttaggaaagagaacgttcagttaacgaaagaactcgccgagatgagatcgctctgcaacaacatatattctctcatgtcaagctacggaaacaaaaacggaaacagcaacggcagttaccaaactgacggcggcgccggtggagcacagggaagcagggagtccggcatgacggcggtgaagccactggatttgatgccggtgaaacggagctccggcgaggacgcggcggatacggtgccgaaggagataaatctaattccgaatccgaagctgtttggcgtggcgattggagcgaagcgagcgagagagggaggaggaggaagtggaagtggtcgagattgcggaggaggaggaggaggaggagaggaagataccctgctgcgcctgcatcacgtgggttctgcagacgtgaaatctgagccgttggattgccagaaccatcgcgagaatcaggaaacgccgtggttgagtccgtgtcacaggacaaatcaaagggtgtgcaactgacacgcggcgacggctaatcgaatgaaacattttagattagatacgtagtgctgtagggaatccgaaaccggcacgcggagacgtcacgtgcgtcgtttaaccgtttgggaccgattcccagaagtttctcagaagtcagaggaaaacgatactttctaatccttttttcttcgctatctcttttttatttatattatatattcgttaaattggacttggactgtagctttgccattgagggtagtgttgaatatttcattagtcctataaattattttacttgcctgtagaaactcaacattcatacttatgtgaatatatttatagttttattacttttatagtgcatagtcactcgtttgcctttgttttttcctctcttttttactgtaagttttcaagttaattttattaataaaccaccttgcaaacagattaaagtaattaaaatcgtgaaataagttgatattttcatgacgtgtttgataaattaaactgtgctatgaattcttatcaagaactacgagcttcttggagagttaaatgagttcgaaaatcacgaagaattaatgcgtataaaagtggaagaagaaagaaaaacaattaaggagattctagccatcaaaacacgttgaaaattcgtatgctttcacaataaaaaaaaaaaaagtaaatgaggttggcattgatttaaacgttttaattatgcttaatagttcaaatttcaaaatgtatgtcataaaaataatttatgtaattttgaaacaaatgaaccttaaagtggtggacggaagaaaaagaggttgcgaaagtttggtttctaattaaaggatggccaaggaagatgaactaagaaaaaacaattcaattcccttctatattgtcctttcaaagaataatcaattcaattaatttgtggcagaaaattgacaaaaagtactctatgatgatgttggtgcatacataacattatatcaccggaaaatttcttatgcattttcggatttttttttctgtaaaacaaaaaagtgaaccttaaatatcacttattgtattaattatatagtgtgcatactcccattagagatttggagtgatccaaaagtgacgaatccgttcgttgaagtgtgagggcaattatcccataaagtaaactttttttatttgaatatattgaataaacattttttcccctcataaaaatagatattactttcacaaaataatttttttaataagataaatataaatatttgtaaaataaaaaaaattgatactaattttaccaattttatctttttaaattttattattttttaatttattattatttttttaataaaacttatataacttttggtttgaaaaaatattagactattgttttgtttcttgatacatctccaagagcagagatgttttaggaggagacatctcgttccacccatataataacgaaggagttccatcatgctcgtgatacagcacttcttttccaatcctaagtcagtttaatttgtgacatcaaatattagagttcgggtttagatttaactcaattttaaaaaataattcatgaaataagagtttctctctatttatgcataatattattttcatcatatcactaacaacaaaaagtttccaagactaaacatttataagtaattaattcaagggtaagcaaataatattgggtgacccggtaagtttagtaataactactactactattaagataaaaagtgagagttaccctctgctccaattttatttttttttaaaaagaacttttcaaatatgggcaacgatgttcaatgattgaagggaagaaacagtagatcttatggtcacagaaacatgataaacgtggaactttatgggctttctcaaagcttcggaagattattataaaattggataaaaatttcaaagggcaccaaaacaccttttctcttttcttttctaaaagacaccctatagttgtagatcttttgaataaaatatggccatcgttttcatccatatagtcgcagcaggcttctctagaaggaaggtactctttcttttcgtagcacttacccgctccatcaatatcaagctttaggaatttggagtatatataatttaacgtgtaaaatatccatcaaactcagctgcaattgttgaaccaataattcttgcatgtcccagcgcattgaccaaccttatttatcttctatcagaattttaatgttaattaatactcatggttttggatccggcatgtatcaactctaggcccagggaacatggaagatgacccaaatctgcatacttaagctggacccggaggatcaggacacaacccaacccaacccaatacaactacttcacaatatagtgagcactctaagactgtttttgatttagggggagagaaaagaaatatgagagaaatgttgtaaatttcatatgaggtttataccttttacactttatttcaattcaggaattccacttctattttcatcttctaaatcaaacccaatataagtctatagaatgtttttcattacataaatactcatgcgattgtcgggttattgtatctaattaactgctggagctagctaattaggtcacaggatagttacctacaccccagttctatataacaggagttttattccacttttagtatataagttagtataaatgtgtgattttggtctcaattgcatgaattaggttttcaagtagtataattaagctcatactccatgcattcattcttaaggggacacacacacatatatataaaactattgtctcttatattcaaacttttaactttttttaaaaattatttttacattttttgtgaaaaattctgcgagaaatattaagtttttcttcacacaaaataaaaattgtatgataatacataaaaaacagagagtaataaataaagatatatttctaaagctaccaaagtaaaagacaaattgcatgtacgccgttgcgttagttctgttgcgcagcaatggaaaagtatgtatagtttgtgaattccttgttgagattcatagaacaatcgcgtatgtatctatcatgctgcaccggcctatagtcaccgccaagagtgctattatttcatcctcctagctagctacaaattaatgtacgaaaactgaaagaacataagacgaaattattggtactatatattagtgtttcatttccttaattataaaaaaacaatgttttaatttgatatcataattatttgattaaattagtttattagtcttttaatttattttttatattcaatttggttatctaattttatgagattcaattttaccctctaatttttaaaattgatgctattttatcttgttgtataaattggattgataatattaagaaatcgtattttgtgattgtttaaaattatttaataatgattttaaaccattaaaaaatacacatttagagagtatgattaaatttaaatgacacaatcactcaaattaatttagatggtaagaataaattaaattgattttaaagattaaagaattaaatcaaatcaattttaaaaattagagatcaaattaactctaaaaaatgaaataaatgaccaaatcaaactagaaaaataattaaaggaaaaaaacttatttaatctaattattctgatttttttttatgtgatgtatattattcatgatattggtggccccactagattgcatggttatcaattaaatccaaaaagttcaaaactgggagtgggtggggaacatagtttacaaatacgcccatgctaaagaaaacctaaatagaaaaatcaacgtcaagctagccatgcactttgcgtgaatggcttgaagttggaattcatcatgcatgagatcagcatgcaggaattctaaggaaaaatttgctgcgtagccactgtttaatccttaattaataaatatattaatttgagaagcacttgtataggttcattgcttaattattactatttcatgcgtgttgtatttaatctttagattcatgtgttctattgatgtggcaacatattgctttttcttgctgacagtgtctgttctttgctatctcttgtgttctagaccgttaaaactcatttggcattctgatatatatagagtgccatatatttgcaaggattcagatcacacaacatacatataataaaatattcagagacaaagaagaaaaacccttctattcccaagttccggtatatgccaaaagttctacatttttaggagtctgaggacaagattaatttataaacacctttttcatcagataaagtaatttttaaggataaaattatgagggataatcgaacatcaaaacaaataatatcacagaggtgttgcttatagtgttatcggaacattgatgttatctagagaaggggaatatatgtcactcttatccttagatatcccaagtctcatttaggagttgaaatcaaaggtatttataattgagggtctaagtaactacctattcgtgcacctctacttttggtttactttgtaagacttatttgttttagtttagtatcaatatgtttcttttgagttgttattatgccaaaaaattaaagttaaaaggtaaattacttgtatggtcaaattggattcattctgattcgatccattgtgatttcaataatttcattcttatatgccgaatatttctatttatctctagtaaaatcttgtttgtgatttacaaattacatgaatcataaataataataaaagactaaaacacgacgatttttagtaaaatcttgtttgtgatttacaaacatgaatttcgggagcataaatgcttcaccaaattaattgaacatgctaatgggtaatgaacatgttctcaattgcggtgtatatacatccttctgtgtccaccaaaaacacaatatcaattatcatgaatttgccagtctcaagggtgcaacttatggctcaaaatcttcattcaaaaaaatcatcatgtggggtatgaaaccatgatgaaggaaagccaatccttgctgaaaatgcactagaaggtgttgagcaaaagatcaaatcaaatatgacaacttttctaaaatatgaagattctttgcaggaatggttcctgaaagagacgtcagattgttgggagaaagaatatatatggtacggtagttgtaccagtttctttggatccgaaatgttactagaatattctctgaaatattcttctagctacacattttgtatggttgagtaaaatttattagaattcaggcgagtctactattcaagctctacattaatatatagagttatattatttttccctcagtgctgctattttaatggatgtaaattgaaaaataaataaaattaaagagttcgatggaaatcacgtcggatatatgtatctcctgtagttcaaaaatgaattgaagctggtgcagtttacatataatgatgatcttcgttataatattttttataataaatttaatatttaaggatctagatttacacaatttggaaagcatgcaactgcagagggatttaaatccatctacgtctcgtcttttgtagacaatttttgtgcagttaaattcctactatataactatcatttccctttttacatgtactgcaatacatgtttgcaatttattttttctttataccaattttaccacgtcactcaaattatttctcacattttcttgtcatctttttctatttttctcatagttatagacaatacatgatttaaaactctaccgatcatgaaattaacaagaaaactaattcaaagttgtaaaatgttgaattagtaataattaaataatatttttaaaatattagtttaatacattaagtaattaaacaaaaataatccttttacaaactcaatgtcttctcaaaattatcttcagttttctacatctcctccgtttggctacaaaggtggtctagcaaaagatgcatgggtaagcaacacttttgcatggttaggtttgaattgtaacattttttttttttttatgatttagtaagattcacgatacacgtgtttaatttgtgtgtcccggtctttgttgttggttatagctcttataatgtttcctttcttggaatctattctgaaagcttcagtggtttctggattaaatgctactgtactacactatgaaacaaacaatgctctaaaatggattgagaaagaaggcctaagtgatacaagacactaactaattaacctctgacagtacatataaataggggcgaaactaggtccctcctgagtaaacaaaatttactaacattcccatgaattttaatattgacaccccctccctcccaatgaattctaatattggtccccttccctctcgatgaattctactatttgtctttttttatgttgatgattagcttatagtttcatagttctatcagaagttcttgctggtattaattctgtgtttttattttccaaagattccagtgatatatatcttgtcaacatgcgtataaaacaataaaatttgatttcaaattttttatattgaacttcaaatatgaagtcattatttcatatgctataaataattttagcaaacatacgttaatttttcttaattacattaattttttgatgcaggttcaactgtgttaattatttccgaatatgtttcttttatcatttatatattgggttttaattttttttgttacattttaaattactgttaatttgatagataaaataatttaattatgagaaaaattaattttttctataaatcattgtcaatttatgtgttcatttttcctcccctgacactttttcctgattccgccattgcatataaaccaatggaaacactacaagaatccttgaagataaactcaatatctcttttctatatctatctatataattagtaagcttgaagtattagtttgttgggtgttcaattaggcactgaacgtgtgttggtttcttactgcaagatcagggtaaaacttcaaggccaaatttcatgcccacatgtagtattatactatgtggaatgtggacgttaaagtattaagagctaactacaagaagtctaattccacttcaatgtcaatgaagttaagatctagcaacatccatcacccatcatatatatacatttaatcataggctttcaactaattgtggttccatggatttaggtaaaaccgtaaaagtttgtattagtttctaaaatatttcaactcgtctatcaccaacatctcgtagcgtacccaaatcacctttggttgatgaacaatattcatctttaatttgcatgattattcattagaggacagtaatgcaaatttcatctttaacaatattttttttccttatacttaataaaaatgtggttaaatttttttgataacatcttaaaaaatatcattaaatatgaaaaaaaaattactaattaatataatttttgtaacattttatcaaatatcatatatagttcatgtagtcaagattttagtaacatgagatacacatcatatttaataaaatgtcacaaaaatatttgaaaatattttttaaatgttaacaatatttttattaagtattagaaaaaaaaaatattacgtaatggaagtacagttaactggttgttgtctcttgtgtgaatggtgtgaaaaataacaagtatacaattgtcgtgaagtaataaactatcggatttattggaattaattgttttatgattatcaatttaaatttaattattgtgatttgagaaggtaaacgataaatattatttgattgatctgatggagatagaacaacgagtataaaaaacaacgagtaaaagcaaattcaataaagaaagaatatcgaaacaagggtatagtcatatcaagaatggtttctaggatattggaccacaatggtaattaactaatccaaatttattactagtagttaagattgaatttctttgatggttgattactttttctagttattgaggttttctttcgagatataaaaatcatgcatggaaactagattcaaaataaaccgatcgattaagtttctcatagtaagtcatttgttgtcatttagatctcacattcatattcatatatttccaacaattaggctcaactttcaattctttcctaattatccaagaggtacaaacatatagccacaaattcacacaaatactcacaataagaaagaatcaaatcaaataaaaagaaattcaaacatcaataaaataaaaggagataatcaaattgaaatcatcaatgtacctatgtcaaatcgatatatcctttctttgattcttgctcaaaatatgacacctatgtcaagttgtctaaataaaacatcaaatttaactccaggcatgatttcctctaagatccatgatgaatcagataagaatttatttctctttgtttaagcattccatagaaaccaatattgtctcaatcttaattattacgtgaccacaaattattaattactactatagttccttttgctccggttcattccccatgtaatattttctaaaataataaaaatacaacctagtgcaacaaaaagtcgtcaacaagaaaaactaacaaataatgattgaatgaagcataaacctaactcaaaattcatgcagaaacaactccaaaacataatgcaaattaaaggaggacacatcggcaagttaaagggaagtcttataaattttgctttaacaatggcaaacaaagaatatattcttctttgattaaagaccgattcatttgtattttagcaaaatcatatagacctgaaatttgttcatctagctacttaagtgtccaattttctttatgtagttccgttagggttcttggactcatattcaccataatgatgccccataaagtgtatttcgtgatgaaatgtgtcattcgatctatccctccgtaaggataatataattcacaaaaaataaggatagatattggactgatagaagctctttcaaatatgagctaattgtttggaatacttgtcctttcttatactggattatacactgttaagtgtccaaactagaagttaagctcttataccaactttaaagacaaaaacatcgatcataaattaaaacataagaaaaagattgaattttatatttggttgtttgcatgtgaattttttttaccagtcaaaagtttgtttaagatggaacctacaaacgaacttttaaaatggttcatctatataaagaattttgtcgtgtaggaacacaatttagaaaacacttgagcaaaaacctttttgataacttacgaactctacaattaaatccctcttttaattaggattaagtttaagacaattaaaccctattttgatgataataaaagagaaaaaaaataaaataaaatgagccaacattatatgttcaaatttgattccttaaaaatcaaaattgtttaattttagatttaccaatatcacttgccacgtcaatgttacatcaaacatatgtatgaaacaaccatatcaaaatcacgtccagcatcatgctaacatcttattaaaatatctttaaaatgtcaggtcaaagaaaaatttgaaaaattgacatcacactaaatataactgaattgatacataaaaaaaatattctaaaacccaattaacattgttataaaaacattcataatcataatattttacattcgaaaagtagaattaagcttttccgtaagatatttatgattctagaattaagacttgattttgatgtaaggtagtatctggtaaacaaggatgaaaaagaataaaagtgtgaaggatgaaaatgaataaaaaaaaaatatgaaaaaaattataaaagagatgaaagattgaaattacagtagtaggtaaattatataaaaaaagttaaaatattagagacaaagcaatagttccttttaacctttaatgtccatctatgtttttcaacccgttaagtaataaatgttttttaaaattatcctcatactcgattattaaaattacataatcatttgatcacataattaactatgttacaaacataattaattgtattataaatatgagataaactctatcaatagatatataattgatcatgatataagcataatcaattatgttaaaatcagtaaatttcaatagtctacataaaatagaataactaattatataagaaagaaaaataaaagaccacaagaatcatgagttttgcacaatattttttggaagcattttttttttaacttataacccaaattcactttaacaaacatccatcccacaactttcatcactaaatgacctcaatttcaaactcagactcttatatcaaacacaccttaaatcaagcgccacccaggaagacaaaaagaatattagataagaaaaggtaagtggaagttaacaatgaacattgcaccctgcttttcagcagacacgggtgttctgaagtgtgacactacgtgtcaagtgtggaaaagttagttccttgcatttgcagtcttcaaattcccattgtcataatcctccgataaagtgagaagaccgcaagcaaaagacaaaaggctgccattccttcattattttgccgatcagtataatccaataagttataacttatgactcagaaacaaaaaaatggagcccaaaaaagggtactgtaggggtgggaggctcatttgattctattttaatatatatttgtttgtttataaaaaaaaatgtttgataaaaataaaatttgaaaattattttaaaatatatttatttttcagttttcaaaagtaaacaatacaaatatctttaagttgttttaactatctattttttctgtaaaaaaatctatttattttttatatatgttttagattgtcttattcttttctctttgaatgtctgattttggggggttaaaggcaagaaaagtaaaaaatggtaataaaaaaaaagaagaaaaaatatgtatagaaattgatataaatacttctaataaataaattatggaaaaactaagagcaatttaatcttttaatcataaaaatgagttttcctatgagctatccgttcaaaatatgggtatttctcacataaaattccctttcacttcttaattaagtaccaaactattgaaggaataaaagattagttgtttggcgtcttcttttttattcctctctctcattctttccaaagataatgttactcttactctctaaataatgttttttaaaatttgtttgataaaataatttttaaaaaattaaacacaccctaaaagttccgtagcatgttccacttaaaaaaattatgcttcaagagtgaaaaacaaaatgaaaatttaatttttttctgtaaattaattttcatttaaaaatttatacctcaaataagaaaactactgaattttaaaattatgaatttatttaataatgtatttttcttcaatttattaatattctttaattctattggttgagatgataaaaacacaaataaaactaataggtgcatttttacttgtttagttttaaaaaggtagaatatttgaacaagaattggaaaaggattcgtcttaagagctgaagataaaactaatcgtcgcatgagtcaaatggtttataagattattttgaaacttaattattaaaataattgaaatatcaatttaaaagaaaagaaaatttatattatttcaagcccctatataccaactaaatgagggtttaatagaaagtattatttttattaaaataaatttatttttaaaatttctttcaagaaaataataaaaacaaatagttatttaaaatccatacgttaatttaaagaaaatatattttatattatttaaaagttcttagatatcaatttaagtgtatatataaaataaagataaaaataactatttatttttttaaaaatattgaaaaattaaaataatcttttatcggcatataattttcttaaaataaacaaaattaaagacaggtataagtctaataaataaacaaattcgtttatgggtggacactagcaataggaaaaatacaatatatatatatatatatatatatatatatatattgagacaaaagattaccataaaaattgatgtgatggattaaagtactggaataaacatgatggtatcgtcgagcacttcttagaataattaaaaaatttaagaccaagaaaagacgggcattggacacttgtaattgtacactgtcactggctgcaatagatagatatgtcttgttcttcatgttaattagtttacatggcagaatataattaatatatcctttatataaacatatgaaattgtgataattgataaaaccatttcatgtgtctttgggaaacagacagaacaatgtaatggaaatttattactaggaaattggaaagctgaaaatataataaactattagtagtgatcaatgactttttctttctctgttcgttttgtgcgtattctttttctttttttctttgcgtgttcttcggtgtgtttcggaagaagtggggaagagaataagacttttgttatatacgtgacataactcaataatttgtgataagctttttttctgactactacaatagtcgcatagcgatacgagaaaaagaaggttaaatatagacaatttcaatccaactttttttttataaatattaatggttagattgttaatttttattagtaaaaggatttgaatccaaaaacaattaaaaggtttaaattatgtctatataaaataaatgatacatgtataatatattgaatacaaataatgtattaaagttaaggttaaattatttaaataatattaaatttaatctttgacgaaaataattttttattaaattatttatctattgatcgaattctaaattagttagaatacataagattaagataaaaaaatttaataattaatccctatgataaaatttaaatcatcaatatttctaattgtgagaacatcattagttttggtaagtagttaatgtcaaaaaccgtgactaatcttaattagactgtgactatatattagattaatatttctcttctaacacaatttatttcgtactaaaaaattagttaaaaatcaaaacttaaattatttcgtacacaaatcattattagttgtatgaatggattgaaaacagaaatactgatgatttaatttgtttcctccacctcctcagaagttgaagaatatataataataactgaagataaaataaataattttgttgtaaaagattcaacaggctttttattattgttattattgattcttatcggctcttttaagctgtcagacattaatctaggtgaaatcgattctactcaagctagcaattaacatgtcaattcaccaattactatgatggaatttcgtttattgacttgaagtcgattaatgataattagcatttagtgtattttattgtgaatatcttaagtttaaatttcactgaataaatatacaagcgccagcatttagtattttattgtgaatatcttaaatttaaacttcacttaattaaatatacaaacacgagataattaagatgcatggtcatcaagttcttttctagatcttgtttgcggtgtaaatatacacactgaataaaatcccttaaatttgaaatatatagatacttttgtggactttttggtatagatggatcataagtattttttacaaaaactaatttgtttgagtcttttacaatcactatgaataatatatatatattttaaaatatttaaagtaactgtatatttgataaggactcgaatttgagagaaatttgacaatttataaacaatttcattttaacaaaaatattaatatttaatatttcttttcaaaaattaattctacttcacattatttctcctttatttgaaatcgcgtcttcactggccccattgacgtggaaggtacgcattatagtgtatggaaaacgaacatttttcctttttaacacgagtccaaacaccacgcagtaaattttgaaaatggaaactaagttatcaaaccccaatcaatcatgttccctaaacgtgattttggtgccaaaacaacaaccatctaatagttaattgagaaactaacaaatatacgtggatttttattacctacaatataactttgcatgcaatttcagaactccttctagccgtaagaaatggtcatatcccaaaaaaatatcaagaagtgtaaggtcatgtcaggcatgcgtggctgcctaacaaggtattggaatgtgttcacttcactgtatttgcaatgtgatttgtaagcgtgttttatatgctgcttttgcttttttatttatttatttattgtttcatttccagtattggaaaagaaaggttggtcaatggtcagtgggaaaagaaaagacttctattatttaaatatcaagtttcgaatatcgtatttaatatatatttccagtagatcaattaaaaattataataaatataatttttaaataattattataaatgtccacaaattatatatatatatatatatatatatataataatttgctattaaataataatataaaattagtttacagcgttaacatgataaattttatattaagtattacataaatacttggcataaataaaaacggacaacagacgtggtctcaaaaaagttgtcaaaaaacatcattgctcgacgggaaacgagccttaactgaaactgacttttttttatgaattagatcgatcgttatttctacaaaaattttgattaataaggattaattgggaaaattatatctatttttttaaaaggaaaatattttcaaaataataaaaaatactaaataattttattaacaaagaaatatttaaagatgagacatataatatattttttattataagttctttttgataaaataagtaagtttatagtttccaatttaatagagaattatctaatatttaatgtaaatgatgattataattttgataaaattattcatttgagttataataatattgtaattcataagataataaaataagtttgatagaagtgtttttggtttaattattagtttctaaataattttttataataataagaaatagagatagaaaaaagtaaaattttgataagagatgaaaattggaaaaagttaagaatttagaaatgtataataaaataaacaaatatgaattcataaaagatgaaaattaaatatatgtatgatgatgatttggtgaatatttaaccaattttgatgataaatatgttaatgttttgaggaattaattgattatgttttaattcctcaaaattgatagtcaataattttatttatagacttaaaataatatcgatcgaattatataatttcaatatatatataaagaaatttctaattacattgatatgatattattaattgttttcgtataacttctttgtaattggactaattggtacttcaatttatcaaaaaatacttcttctctgatgctttttaattacacatgcatgaattatcgaaattagtaattagtaatgttaattgaaataatttctttcgattgtataaccaaatttatcaaatttttatcatattctacttactttttaaaggattctcccacaaactaagtatatcaaaatttaatttcataatttaaccaaattttacataagagagatatcagtaagatttagtttgtccgctgaatttaaaatacaaatcctgaacttgataatatttctttttcattgatataagaaataatgtgcatgaaattcagcaccttatcaaaaagttgaattctaattcgccaaagatatattataatgtagtgggacaaatagcacacattcttcattctggtttcgccaatacgtgaagcacacatagtagattctaccgttaatcacacataaacactgatatatacaattcatgaacctcaagtgacttaggataaataaatgtagcatatgatcattatctctagctagcgtgtcccattaaaatttttgaagaacccaaatttcttacctaaaacggaaatcttttcccgaaatagacaagcctgtgtggaatctctctttatgcttctaatccaaaccaagctcgttatcactctctccaaatccttttggcgcctataaaatgccttcaaaatctctcacttcacatatatcctcatacacaaagttttaattacagcatatttttttcattttcttcgatcccttcactttgcaatttcatgtctaggctcatggaaccacttgttgtgggaagagtgataggagaagtggtcgacattttcagcccaagtgtaaaaatgaatgtgacatattccaccaagcaagttgccaatggtcatgagttaatgccttctactattatggccaagccacgcgttgagattggtggtgatgacatgaggactgcttataccttggtaaattaaattactcattcaccctagatatatatttgagattatatgtctctactagtactaacactgggtatatatatgtgtccactcttctccccaattgccaaacggaaccctctagatcatgactgacccagatgctccaagtcctagtgacccatgtctaagggaacatctccactggtttgtataatcaaaaactctctattgtctatattctttgtactatgtatcaattccctcacatcaacttttggtgccaatttgccaggatggttacagatatccctggcaccacagatgtctcttttggttagtctctctcctacttatctatgtttcttaatctaaggataatggttattcttagaaatacggttctttcatttctatgcattattagtgtaaaaaaaattaaataattaatcaacaagaagtcattattaatatgacttttagaataattaatgtaaaagtcaaataaattatcaactatatacaattggataacaatatatatatatatatatatatataaagaaaaaggatatgattttgaaagatccttgtaataatattcttacaggaaaagagattgtaggctatgagagtccaaagccagtaataggaatccacaggtatgtgttcatcttgttcaagcagagaggaagacaaacagtgaggcctccatcttcaagagaccacttcaacacaaggaggttctcagaagagaatggccttggcctaccagttgctgcagtttacttcaatgctcaaagagagactgctgcaagaaggaggtgattcctgaagaagatgaagaagaaaaggttgcagcagtaaataaaattaactttattttaaccttaattgtctcataatgagatttgtttcctttggttttcttagggtttggcatggttgaacaataaggataagtgtgtttgattaaatctcttcctctcttgagtttttcctttggaggccacaagggaaattgtgaggtagatggtgttcaaaaggtagtagatattcttgatgtactttgtacttctagctattataggttatgggaagttggggaccaaactagtgttatgatcctttaaggatctatatatgatttgtgataggaattaagaacatagctttaccagagctgtgtggctttctagtagagtgtaatgatatgtgtgatgatataattaatgagaaagaggacatgtgttatatgcaaagctgttactttctaacactttcagtggtcgagctctgtcatttcaatttctccacccttcaaatgagaattgctgtcatgatcacatgcatatctatgatacttttaagtttactgaatgtgtctaagcataaatggcacagagcaagtccttcacataccccatggggtgtatgtgtacaaaaaattgcctagcccttaacaattgttcattaaacaacaatagtctatgtctgttgaagacaatgataaagttaaataatctaggattaaaatttgagggatgaatttattaaaatatcttaacaccaaagtataaaaaaggagcaaaaatgtagtcttaaaatacaaaaggacaaaagatggtatatataaagttgaagtttaaactttaaaatatgcatgattgggcttttatttcctgtgttttcaagcattaatttttcttttgaaaaacaaaagatatttatgggattctaacaccactcaaaagttaaattttttacgattaaatttgtattcaataatgtgttgtctacactttataagttgtaattttaggaaaataaagggtggacattcaaatgttagataacatcgagaaaaagagaaatgtaaatataatagattatattgcatgtgtttggaagtgtgttcacaaacatgtttgaaaaaccaagtctatttcaaagagaaaaaaaaaatatagaagctactctggctaacttttgtttagacaaattaaattatgtcttacaaacatgagcccaacacgttcataatgtgataataaaagtaataataaaatattttaaataaaatggtattcatgcatcattatttataattttatttgtttaacaactaatagtttttgttacaaataaaaaatcgtagttattatgatatgataatataacattacaaatctttttttaactagcaatgatatccatacaaataatttttttataattcattttcattttattttttttacttatttattttttcttgcatcatatatcatatttattattttttttcactcttcccaatcaccccagttcacccattttgggagatagatcatagatgtttaacatttttctattctatttgttcattgcatcatatatcatatttattattaatattatgactaacatgactagaaatgaagcatgaatatcattgcttaattatttggtgccatcccactctcccacgcattctctgaaaagtgtgccttgggcaagtatattatatgcaaaaccatggaagaaacaaaagcttggtgagacaagacatactacaacagcacagcattagcaaaaagtaataattggccttattaagaaatggcgcgtgtctctttttctatggatgcagacctcaaacgtggcaaaacatcattagttagatgtgactggcaactacgtgaaggagcaaatcactcttccaatcccagagaatttctcttccatgcataatttagtttcacatcattgacttccctaagatattttagtggggccattaataaggatgataataataacatgtagggtagtagccatgcaacaaactctgctttcccatgctaagtgataacacgtttcgaacttatgctggaagccaagttactcgatcaaaccttggtcaaaataaacactggttcgattgaattagttagtagcttggttacacatctattgaaaaggttgaggttttttttcacaagtatttatcgaaaaagaaaatataaaaaagcaaactttttctataaattttaatcaatttatacatttattttttataaaaaaaattatcatctaagttctctaactgattgttaatttgttgagctgaaaataagagaaatggttttgggggtaaagaaaaaaaaccatactttgaaatcttttcaattggtaatcacaaagtatgaagtgaaaagaaaaagttatatagatcacacttaaaaaaatgtttctttccaaattgaaaagaaaaaacaaacttttataaatgtaaaagacacacataactttatttatatcatatcatttttcatttaaaaaatttgttattatatatatatatcctgataaataaaataaaaattaacttttttccataacaactatctcactttctattatttttttgttcgtttccttttttcccactttttcctaaaccaaacatactctaaaagacgaaatgcataaattaattttaatctataaaaaatactcaatttattttatcttgttttcttttttctacaagtaatataaaaaatattcaaacaaaactaaatacttgaatagatattttttttataaaaatatataaataatttatgatatatttataagtttttttattttattgaacaaattcttcgcaatatcttataaaaataacttctaatttatatataaaataatttagccttattttcttttcaattacaaataaactgttagtgtattaagattaacttcatgataagaaataatcaactaatttttcatgaaggtaaaataaataattattatacaatttcatgataacaccgtgattttgtgagagagaattaattcttttatgttattcaaacacattgtaaataaagtcttctaaacacatgataattcttatagaagtgttctcaagagaaacaaatcatttcacttgtaaacacacaatgtaaagaaacaaatcatttcacttgtaaacacacaatgtaaataaacttaagcatgttgtcacaagattgattcgtgaccatatgaatggagaaaatgtgactggtaattagtcatcaactataagttaaaaaatattcttggtatacaaaaaaaaaatcatgcagggacaaaattagttgaacaagtactttagcataacatttagtgttgatgggagaaacaccctcgagatcacaaaaaggacaattacaaatgtagcaacaagccgttacagcattcaaagttcttgtaaacctataaaataaatgataaacaacatatattacacagaacttcctatctgaaacaagccaaaacagatagctatttttctttttcctctccttttgaaataacacctggtttttctatgataaaaaagaaatccaattgcaatcaattgcaataacaagcagctcatactaattttactaatgctctctaaatatcataactgagaactaaaaaggtggtgggatgctgatatgcaagattatctatcacctcacatatacatccattggactttcaccatatgaggctggttaataagataaactatagactccttttttgatctaagattgtatgaagtatccacaaaataagaatggccatgtaccaacctcttaggtcaagcatttatttctgaattgcattgatgctcccgactgcaacttcttctaccccaaaacatgcctgagcatgttgttttctccagcctcggaccatccattttatcctgatccatcatcgaagcatgcgagtggagaggcgatccaccttgtgcttctgcttcccggggttcaaatgatggacaaggaccattgttgcatgtacacagaggaattgctacagatggaaatggagtgcaagtgacagggcaaagcatctccgatggaacagaagctacacggtttcttcgaatctcaggggtatgagaaacagtcggtcgatctaggtcacatggatgtagcatgcatggggtacacaggctgagggacacgtgtaatttattttcttttgcttgggaacctggtaatttgacaaaagagataattccatgtctacaaaggggacaagggatagagccaggaggcccacacgtctccgaagaaacattgcttgttgagcaaagatagagtgcacatcttacacaaagctcatgcccacatcctgcatggagaagtcttgagatcagtgacattatgaaagcatccaccagtaagctcaaatgtcaagcactctgcaagtctttaaaatgacttaggtctcgtttgatttggtttcagattagagtttttaaaacttgcttccaaagctgtttgaaaaattgtttaagctcagttttcaaactgaatgatataaacgaaataattgtttggtagaacttttcaggtttttaaaagggatgagttttttatccatatttttagttgtggtttcagtgtcactgacgttcaaatgacaagtttattacaaagttagcattaattaacatggttatttacagttgtgcaacggtgttgttataaaaactgttagagaacatctttaaggtgttcctgttttataatttcaaaaccaatattttggaaatagtttccaaaatagctacagagaacacaataatcaaataagtttttttttactaaaaactgttttaaaaacataaaacaaacaaggccttagtacttcatattgtatataaagagtggttgatctagcccagtgagcctgcactttgttagtcagtctgtttagatagctagttagaggagttgttagctgtcacatcagccataattgattgcgactgtattagatcagtataaatacttgtaccctagcattctttcatttgaataacaactcagaatgtcagttctcccaaattctctctgtcaattctcattgcaccatgaaatctaatttggtatcaagagcttttcatgatccaaacaccatgagcttactcaatcctcttgattaataagttttccattttctgatatcctaaacttgaatgtgtaaagaaaagtaagttgcaacttgcccctggttttcaaaacgaaaaagaaaacatgggattgctcaggaaatctcatattgctttccttcttcactttaggaaagaactgcagatcattaaatatcctcatgcagacaagcaggcatatatactttaaactgatatccaaaagatagaattcagtaccttctgcagccactgaacattgcctctccaggcaaacagcacaaacatcaacttcgttagaggaggttgtagttgattgcagtccacactctctgcagttattcaagccaatcgtccatttgcatcaggagtatacaagagagaaatattttaacatttaattatactttggtacatcgggaaaaggacatcgactaaaaaagtaattttctctttctccttgtctttcaatagattgataactttatttcttttgatactattgtgtggtttttaagaatcatacaacaggcaagatcgttgcatttcattctaaacaagacaaatgggaggatccacagtgaaaatgactttgggcccaacttctaatgtaagaaatatttcatcatgaatataggtttttcttatatgccctatatcttgaataacttacagaaacccagtgttgttagcatttgtctcaacctacatcttttatggaatatacaaatcacttccataccaaagatggataagttgactaatattggtaaaacataacaaaacctctgtttcacttgtaatagcaaccatagaaagcagtgatgcatatctaatacatttaatttagcaagtactgtgagcaatcatatcatgagaactttgcaactattttcctattaaaggcctactgataccaataacaagatacataaacatggctggaatcctaggttcaaagtagtgatctagggcttgtaatcctcaagaaggtctttgaccctatcatgaagggaatacaggagagagaaaggaaagcctattgtactgttgtaaaaattaaaatattgtatgaacaaatttaagatagaaagctttagataatagaaggaattaacatgttagaaaaccctcacacatttgtttttttaggataatatattttttttatggaaatattttgttaaaagaagtaaaaaagaacaaaataaaattattgaaatggtgttgatataaatgtcatccacaatgtgtatatatatatattaaggcatatctagtgagaaactcatttttatataagaatgaaaagagtaaatttgggtcatataatcgaacatgaatagtcaacatttaaagtcacatgattacttaaaagaatcatgtgagttataaaaatacttacatgacttgtgtgctttaatcttgaccattcgtgataagatctaatgattaacatttattcttctcattctcacattttatataaaaataaaataaaaaaataaaaaataaaactctcattaaatacattccctatgtgagagtagttttgtataaaaggggtaagaggagtaaatctagaccatcaaactatatatggatggtaggactaaacgttatttaatgatcacatgactacttaaaaaagtcaagattttgtgattgaatcttaaatcttcatgattctgtcttataaccaagactcactcctttgaatcaaaataaaagccctctcacatgatacatacatggtttaatgataattaatatgaagatcctcccacaccatgctatccagctattacaattatgttggaatatggactgaggttatgtgtggaatcataaaaaaataaatgaaacagatttatttgatttgatttaacaatcaattcacacgtttggaacttattacaaaaatgagatttgaatttgcttacaaattaaattatatctttgcaaacacattaaagattaatagagttgattttgtattaataatatactttattaccctcacataaaaagttatatgacttgagggcaaagaaatcaattcaaaaaactgaaaactataatccactcaatccactcaaattcaaatgaatttctatatatatgcacaactaaaatggcaatggattcccaggcaggaagtgagaggatactcatttgatttttatatcacaaattggaaactaaaattgagaaaagtgtcattagtcccataggctgaataatgaacactaaatactcaagtaattcttctctcccgaacatgcaaggaaaatcaagtttaattttttgaattttgtaccctataatatactttatttcatcaaacagacaacattaatcattctagtaatctcttgttcaatattttcagtaataaatctaacatctaaataccctcggccatttccccaaagtattatttgttgacatcacgttagacatgcacaaataaaaaaaattaatgtataatttatcaggtagacaaacagcacagcaccccatttagcacatcaggaaaatggacaaagtccttcataattgaccctttcttgtagtgtataatcaattattttgttgttcggagaaaattaggttggatacatatttactttctcatcttcccaaaatttctttgttggttcttttcccatttaatgttatttacagtccccaatattttccaaaatatttccagagctgttctccttgctgtttatcattttcattatctagatatattgactgcaaagttacctggcaatgttgagcacactcatgagaggcaaggataaataatttgaagaagggaatgatgatattgtggcatcagaagtaggtgtcaacaatggttcaagccaatgacgcccccacatccgagcaacatcaagtggaagccatctggggaaaaaaattcaaatctatatcatttatgttatagggaaggtaaaagtttgtactaaaatttccattaacagtatcttacccattgcagttcaaagccatccgacttgcacctcttgcaaggaggatctgaaaaaattaagagcatgatggcatattcaaaagaaaagaccaaatggaatatctcatcaaagttcatgaaattcttgcctgacagcattttaaattgcctccacaagcagcataatgcaatggagtgcttccagcccctatatcaatgaacatcagtaattttcaagaaaaaaagaaaataaccatacatttgtcagcaaattaaacaaaagactacctattaaatccattgatgtaccataatgaaatgtcgcagctgacacatttgcattaagatcaagtagcagttgtacacaatcaaagtgcccatttaatgcagccatatgaagggcagtaataccagcatcagctgttttgtttacaaacttggacagcacactgcactggaataaagtaaataaatagcaagaagataacatacaaaaattacagctttgtagaatagtcatgcctcaaaacattcttaatatcaataaaactaaaagaaaactcaataatttaggggtgtaatctggccgagttgggtaggttttgtgctattcagaaatccaaatcaattaaacaatgatgggttgggttctctgattttttgtaggaaacccgaaacaaatcaacacaatctctattgggttggtgataaacataaatattaaatatcgattaattcctctttcctcccaaaacatccttgattcatcaatcatcgcacaacaaacggcacccacaacctcattgcccccttcaacttcaagaagctcaagccgaggaatgaatttgttgctggcagtagaagggctgaaatgccggtgacccaatcaacggcaatgagaccgtcacagatggaaaaaagaagccccctaatgatgccaacatgattagggtgttcatcagaagcgagaaatggtgattcagccggcggtgaatggcaaacccatagatcatgtccccactgctgtgcaaacctctgccaaacccatcagaaatgccactgctgtgtaaacctctagaagggtggtgtctccaccatgggtgatgcagggtttggccttgtagagggggattgtgggaattgcagaaaacaaagccaacttcacaagcaaagctaagcagtgcaaaactacaaatctcaccatggttttggtttataataagggtgttgattgttgaaaaatctggtgtagggatgttcagattcaattgtattacttcaggtttgcatactcataacccgaaccgaataaagtcaggttcagtgatcacggtccaatccaaaccaattacacaaaccaagccataaaaaattgggtttcatgtattagctcgtaccttacatccctactaaaaactgtcataattcacacagaaagttaagcatagctcctcataattaatatttttatccaatgcataattagaatattatgcagtaactaaaatgggtaaatgcatatgcatgaaactgtaaaaataataatgggtagataatactaattatatgatgacattaatgcaaagaacgctttaatacaagcatgtcacccatggtgaaaatatcttagtaattcaaccaaatgagacaaatataaaaatcacgtgaaattcactgttttaagaattacaaaatgaaaacttgaaaaggaaaggcgaacctttgttcatgtttgtttttcacatttgatccatcaccctcagcatctatgcgagcatgtaaagcttcaaaaggagcacttggaacaaaatctgccaagacaagcctaatgcatcttgcatgcccattgatggctgcaaagtgaagagctgtcctaccgctgagataatctgctttcacaacctgttatcaaattagttatagtctagttattcttgtaaagaaactttaaccatgtgaataggataatacacttgaagacaacaattcctttcccacccatccgacacagtttcaactttcaacaaccaaccctgtaaggctgtaacctatggtctccatccaacagttcaaatataactaaaagacaaaaagagggagagaaaaaagaacagtgaagagaatgaattccttccataaatggagaactcatactcacattgcatctgaagagcagaagggtctgcacaacttcccaatgaccatatctacaagcttgcatcaaagcagtcttcaaatcaagaatcaaaacaaaccaaaatctcatttagtaagccatattctgatttctgaatcagtgcatcataaacatgcataaaaggaaagcaacatgcatacaaagaaaattgtgtaaatctttcacattatcatgctgacacctattgaataggcaccagacccaccgatctgtgaataatcataatgcacacactagctatgtcagtgtgacacggaatagaatcatacaaaggtgtaaattcatattttttttcaatttgtaacacacaacatcatcatccaacattgaaattcaccaaaattcatcacatcatttgcaatcaaaccgtgtaaattcaccaaatcaaaaccaacacccacaaaacctaaatctaaatccaaaaccaacctgccatattaatcacattaaaaaaaaccaccaaaacaaaaaaccgtacctgcccacagtaatttctcgaattcacatcagctccattttcaagcaacaatgccacaatctaacagaaacccagataaacaaaatcaaaaagggggtcgatgaaaacggaagagaaaaaaaaaagactttcaaacatgaaaatgagaaaaacgaaaaaaggggtggttgagattgagaattgaaacctcgttatggcccttggaagctgcaaaatgaagaggggaattgagacccccgaaagttgagtactttgcaagacaagggttgcattccagaagcatcttcgcctcaaccaaatcgccgtccctcgccgccgacaccaacctctcgccggaagccgaacacccaaatgaattccccatcacacacacacacactaagtgagatcaaatcttcacaatggaggctctaaaaaacaaagaaacaaaatccaacgagagggaggaggcgaatcttaacgcaatggggtgtggtgtgtatttatgatgtgaagaaatttggaaactttgctttaggatttggtgaggaagaaactgtgatggtgacgtggcaccttcctctctatatctatctaactttgtgagacagagaaggataaaacaaaaagaagggttgaaggtggtagctaggaatgtgattgaggtcggtgttaatggtggttttgttatctgatgcggaacaaaagggaaaggtgaacagtgaacacaacacaaatttatgaaagaaaacgaaggctctcactttttatttatgttctgttctttgcttctaagtgagtcttgctttgacttttttgtttgttcctccttgttcgatacattggttaaaattcttcctatatttttttaatgattactagttgcaaaaccgccactgcctgacttgttattttggttagatatagctgtaaaaactttcatattgaaaagcttttagctggtaattatttgtgatagtgggtgggttttaaaaaatagttaaaggataaattagaaatagttgatgcacgttgagatgaatgtatacactaaaatagataaatataatttgtttttaaatgtgaggtcatataaattgatcataaaaaaatttaatttaattttttaaaaatataataaattagtattataaataatttaataataaattgatacataaattttatattttaattttaagttaattctaaaaaatataacttatataaattgatgatgaatattataacttaaagataagattgttttacagatttaataatatgatcaatttgtcaacatttttttttttaaattgatttatcatctcacatttccagctactaaaattggtatttgtcatatttttaattctcttacatttacagtaataaggtagaagcgactaacgtatatttacttttttaattgaaatacattcataaattataatttatattattttaaatatattttattattatagttaatatactccaactaaaaaaatattataggttagcaaatcccatctattcatgggtgtgtgcatgtattaaatttacttctattgatggatagatccaaaaacaattaaaagaatgtctgaaattaagaatacggggagaaaataggtgatgcatagtataaaataattttatataattatttaattttaaattattatataagataaatttattaatttttataataattatataaaaagtcacacaaatagatcaattactagattcattccaataacttgtgggtaaattgatttgatctttgatattataatctacatgtcaaaattaaactaaattaagttgaggattctcaaaggttagttttttttttatataatgttaaaactaaattaaacggtaatatcaattttagaaactaaattgaatagggataattcacaaattatattttttctaatatcacaaattaaactgataaatactaattttaaggactaaagtaagattttacttacaaagtttgagatgtacaattatttctatttttatttctttcatgtacacacatctcatacacatcaaaatataataaaatatatattttctattgtaccaattttatatttttttccataaaacatttatgttcttccaaagtttggctcatgcctctgaatgttaaataataaaaaatctaattttgattaataaaagtacatataataaagttttatttcaaaaaggaagaagaaagaacaatatataaacaacaattaataggttgaattgtatctgttgaatttaattagaaattttgagaatttaaccaaatggaattaattcaatatgcatacaaaataacaaaatccaaaacatttttttataagcaaatgaattaatgattaactgaatatcacaactacaaaaagaagcttctacatcggttgaaaaccggtatctacgacgggccccacaccgtctttgttccagatgtcgttgtatgtcgacaacaacaacatcggtcatcctaggacccgtttttgtaatgcaagaatacaacgtcagtgactataaaagaatagacgttataaaaaaggattcaacgacgcacatattagacaacccgtcgttgttttggtccatttcaacgtcgggttagcaagactcgtcgttgttgttgtccatatcaacgtcgggtacgaataacacccgtatttgttttgtttcctgtcaacatcggtggcgggctcaccactgacgttgtttggtactatgtcaacgtcggtggtgaggacaccgtcattgttgtttgaggtttcaacgacggtggctcgtgcacccgtcgttgttggtaaataaggctataaagacgggttttcataaggaccgtcgttgaagtattttgcctgctcacaaaatttgggttataccattcaaatttcaaaaacaaagctacatttatatacagcaaacatatataaatacatttaaaggataaataacacaatcatgcatcaaccaaaagaaaagggatatcgacggtgacactcacagtgagaatgttataggtggttcaaagttcatcaaagcctttcatgcatgcgttgtttatatatatgaaaataaaacaaaaccagaaagggtatatatatatataattaccactcgagccaataagcaaagggagcaatggacacagtagcaaagagttgtcgataagcaacaaggacaagagggctcattccagattctattgcaagcatttaagtaatgttcatcactgcatagaccaattgcacaagaaccaattgcaagtagaccggcacccatattaattgtctctttctcacccctcagtcttaatttgaactttggagagagtgttgtatgtgatgaatgaaatgcatgagagtgatgaagtaacttataactagttgattccagtcatgtgcatgtcaacaaaatttaatgatgcttttgatagaaaacaaggcagcaagtagggttcaccgcgaatattgagaagatagatagaacatacctatatacagctgcgttgaaccattgctattcatagaaattgttactagtcttctgtgttgggccaaagatcaaatttgcatcctttcaggccaagcagaatttaaccttcgtgcaaaatcttccacttccctacaagaaaagaaacaaagtcatcaaatgcaacataaaagacaaaacaaaaaaataaaccactcaacaattagctgacaagattatcctctttcataggttatattttgatatcaccattccacaagttgtcaactaaaattaaataaatgaatgaactactacataagacaaatgcagcacgctcaacactgaagtcaattaagcaagactcctcttgattaataatattttacatcttatgcaatcaatgaaacatgcactaaaccagtcaggaagattctgcatttcatcaaatgacgatattattttgacccttaacacttattcttagttcctaataaattagtaaattttgtatttactccttaataaaaaaaattatttgttattagtcgacactaaaaaaaattattattttattatggagtaaatacaaattaactaatttatgagagactaaaacaaaatatcaaaaataaaatataaaattgttattttagtaacgactcagcgtaaaccaaaaattcattagagaccgaagagaaaaatgaaatatttattacaaatcaaaagccaaaatagtaaatttccttcacttgtatgatttaattaatttatgatatttaaaatttataataatattttgaataatatgtaaatataaataacaattaattatatgaaaactattaaaattaaatattatttaaaataaaataattaatcttttattctttaatagacaattcatatttcattagtaattttgttacaagagttgcttaaggtgtttattagcagtatcttgtacttgcgagagaaaaacatactaattgttatattttgtaacataagtatttttttttcttaacataatcatacaacattaattgatcatagaaaaaatatattaattgtaataaatatctacaaaaatgatatttttcgaaaaaattcaatcagtctttcattgagggtttctaatgatattaatattgcttgttgtaagtatattaaaattaaaaactataaaaaaaaatttcattgttattaatcaacacattaaaaaatagaaattacatattataaattaatcaagtagaaacacatgtgacaaacatgtctactaaaatgaatatctctacacatgagaaggttattaaatagacctcactttgaatttcaatcaataaataatttttttgtaaatataaaaaaagcaaaaaaaaatcacttaaatattatatattttaaaatctaaaattttcatgttcttccaaagaaattgctggacacaagagaaagcaccaccaaccaatctttatttgatttcaaatcgtgaaggtggccattgcatatggagaagatacggggaaaattctaaagtgtatcctgaaaagctttgaattggtctctggtcttaagataaactacaataagagaaaatttgggtgtttgggcaaatccgaggactggtgtagggaggcagcatcttctctcaattgtagttaaatggatattccattctcttaccttggaattcctgtaggggtcagctctaaaaataggtctgtgtggcagcccattattagcaaatgcgaggctaaacttacaaaatggaagcaaagaaatctatcaatggggggtagaataaccctcattaattcagtcttaacagccttacccatttatttgctatccttcttcaagattcctaagcttgtggtgcaaaagattacatctatacaaaggaatttttgatggggcagcctccaagactccattaagattccttgggtgaggtgggacagagtctgcctacctaagagtaaaggtgggttagtgatcaaagatttgattaaattcaacgaggctttgcttgctaaatgggggtgggagttggcaaataatcagaatcagttgtgggccacaattctattgtgtagatatggtggttggagggatttgatttctcataggaactgcagtttagactctccttggtggaaagacctcaaggttatcttcaagcagcagcaaagcaacacaatttgtaaaaatagctttatttaggccataggtaaggacggtccatggaatacaaaccaagtacttattggcttgacaacaaaaaaaacactcattggaaatatatatgtttagcaattagcatagactcgctgaacaggaatggagaaatatgacataattagattttcctttcacaaagaatgtagaagaaactaaagaccttctcttttaggggtacaaataatttgaaatataagtagaaattggccttctgggcagagaagatgctaatgaggatgacaatttgataacactagtgcattgactagaacttgctttagacttggtcatgcaaatttcatcatgcttatgtgtgttacattacatgtattacaggtgtatgcatgtgaaaacagaagagaatgtccatgaccttgaatggaggaaagagatacaaaagcagaaaaattgcataaaactggatgatgttgggctttcacataatagaggaagagagaatatatatatgtgtgtgagtgtgtgtcaatctcctgcagaagcagaaggaacaaaaagaagtggaaaccaagcaattccaaagtgatgatgcacagagaagagagaaaaatttgagtgacccaagaagagatgtttttctttctttaaactgaccagaggaatatttttattttttatgtttaatttttttcttttttctcttgcagagggaacaaaacagctataaaggagcctaaagagtgtgtgagagaggagttatggggtctatatatatgaagaaggcaaggcaagtgttgaaaaaattgggtcggaagaataaaaaactcacagtgaaaacttttttttttaagaaaatgtttcataaatactccatatattatcctacacttagagagaaaataaaaaagaaataaaaaatataaatataataaaatttataatgtgatagcaaaaaaatattgatgatgtatttaaaatgaaaaatgattcacctacaattatttttaatcataaaaaaatgtatgattatttttttaattacattacgtaagaaaaaaagggtggaatttggggtgtcaaaatctgagtgcatgacacagataagagttgttaaaatacataagaaaccaattctggacttatcaagggttgtttgaaaccagttccagttaaagaaaaatgtacatgtatttatattgttcacattaaattttcaagtagtattatattatttgaaaatttgatatttgtttcaataaaagaagctaacggcctcacatcgctaacctttcgcaatgggagaaggtggagtcagagttgtctaccctacgttgttaggaatgtggtttctagataatcagcaaaaagaaacttactaagattcgccatattttttttagttaaatagttattattaagggtgaaactattttttattctataacatgtatgtttaacttttaattgcaaatcatttgctgaatcaatgctgaaaataatatttactttcagtgatctggttagagcacaaataaccaaggaaatttttatttaaaaaaaatagcttcaggggttcttcacttcttgacttaccaatacactttgaggcttgagctactatttcaaaataaacaaataattggcaaagttagctgtatatgtgttttctagagtcagcatcagtagttattacaaactatataataacatttttttttctttaattccatatgtatatattgttcgttatcaattcggcctaacaaatcttactatcgagatttcgtggatgtttcaaattaaatgatataactaatcttgtacatttctttcaacaatactttctacttttgaatgttaggaagaaaaaattaatttgatgggggaaaaaaacaaagtgataatatatatgtatcttttaaaaggatcttagttctactatcacaaatattcttggtatgaaaaaaaaaagggaaatgatagtggaaatgatgggggagggtggagtaaatgaataaaaatgcagttttttataggttgcatttgttatttgcttctaattaataagaagataaatatgcaaccttacgcagcacattgaaaaaaataagaaagtaaaacccttgcagaggaaaattttcatttggcaaacataatccatgagaaggaaagatagaaaaaaaatccagttctcataattaatgtcgaactcacctatatacccatcgggtcaagtggcataaatagatgtaaaaggatgtgttgtattgtcgagcctttgtcatgtctcaataatgttcgttataaaggtgaagggtctaaggtgttagggaagcggagaaaaaggagacaaactttttgccaagaacataaagaaaaaggagggaagtgaggtgtgtgaatgcgtgggtcagagatgaggcagatatgccgtggtcatttgatagcacttgtatgcagacacaataacgtgggtgggtatttggcttgggcctctctctaggagcatgtggagtctgtcagagagtgagggaaaaactaacaaaaaagaaaggaagaggtatagtatattttggtgtgcttgatacttcaaagaacttctattcattttagaggtttatttacagacatttttatcaatgaagtgtatggagtaactaatagtcttaaaattcaagtattaagtatatggaagtgggctaaatactttaagcaagaatttttccacttataatatatgtattcaatttgacttaatcactactaaaagagaaggcctttagtttcttctacatttcaaattatttgtacccctaatggagaaatatgaaataattagatttttcctttcacaaagaatggagaaataggcaaccaaagcaagattttagaaacacttcattgtgatgcacaagagttcagaaacctccaaatcaccatacaagatttgatgaaaaaagtagacataaatgaaaagagcacaaaaggaaaaagtgttgagtttggtgaggtgaaagggcatcaatcaagattgacatgggtgcatttaataccaacttactgtattgccagtaagattgctgaatcaaccccatggtaaccattcagtccacatcttactgtattggcagtaatattgctgaatcacttggcaaagcatcaatcaaaattgacacgcatgcatttaataccaacttaccaatcaacaaaaaaaactaagatacacaaagttaccaaccaataacaacccataagaaaattttatatttttaatcatttctaaacgcacaaagtatatttaataaacaaaaagtaccttgtggttgtggcagcaatagattcaaaagcttgttcagtccttatgcttgtggcagcaatacgttgaaaaacttcttgagtaactcttccaattgatataacttcctctgaaaaaatgtaacgaaattaattcaaacccacaataagaagctttgttcactgcagtttcaaatttctgctttattagtcttcttttttttatcagcaaagataaattatatatatataacctggaagtaccagaggtactgattacagagttagtcaccataaaaatggttcctcagtcagacatcataagtctgattgggaaccaaaatatgggaagcaaagtatacatatattgatccctactccctaatgaaacccctactgctgcaaaaaatgatgtctcaagttactagaccattgactaaaatgtaatgtaaagtccttctccaaattatggagccaagtccacattaagaaagtcgcgtcttcaaattaccgagattgaagttcttctaataatatccctaatcatataacaatatttaattgtttgttgttaagcacattactatttatacactttaaatttatgaagctacaaagtataagatttttatgatgatatgttaaaaataaattctgagtcactatatgaaaacaaaaacaatggtatcaatttttattttgatcagcaaagatattattttatagatatgtaaagagttaccagaggtactatattacagcagtatggctaccatagaaatggttccaaagtcagacaaaacaggtctgagagggaaccagtatatgggtacagtaaatgtacatctattagtcaaaaatatgtatcctctactgatgcaaaagccgtgtctaatgctacttgaccattgattaaaatggatagtaaaatctttctcaaagtgcctgagccacgtccatagagtgaatattgcatcttcaaacagtttgttagcattaaaggttgcattagagaacactatgttgttcctaagcttccaagtggaccaagttagagccaaccaccagcattgccatctctgcatcctaacactatgttgttcctaacaatggtatcaattgaataataactacaattaatgactctaatttgttaggactaagctcagacatatttctttctcaaagttctattccagccatgacccaagagcatttcttttagacttttccaaaacctagtgccaaataattatccaactcgaatagcagttgttggactctaagtttcagttcaagcttaacaatcagtgtcatactattgatcaaaacaaagcaggtataaatatgcaatactagactcaaaatatgcaacaaacactagacctaaatcagtgtcacagaaattggaagaaaatattttatccaagcacaaacttcaagccttattccatgtgttggggggaagttatggctggccatatgggtagaggtgtcatagaggagcaggtatggaggaagggaccttggactgctgaagaggacaggttgcttgttgagtatgtcaggttgcatggtgaaggcagatggaactctgttgctaggcttgcaagtaagaaacaccaaacttttttcactgttttgtttcttaatatatatgattggattttcacatttataagtgacaatatagcaaaaaaacaactgaaattgttttcaacttctactgttcatgttggctacattcatgttcaccggaagctcttcattttgaaaattatactattgtctgatagaaattatgatatgatctatgtatctatagttttagtcaatctctacgtgatacgtagttgagtttttcaattcacaataaagactagataaaactcaatatgtgaatgggtttggggaaaatgtgaatcatagtacaaaatgtcggtggtggattgccttaactagctctatatggcagcataggaatcatttgattttccaaggaaaaccttttgatccctataaagtcatggaacatgctaattttttagcttggtcatggttaaaggctaaggataaaaattttagtactagcttccactaccggtcctctaatatttccaatttctttgcctagttgggtttgggcctggttgttttttgcttttgttgatggttttcttggagggtaggaccttggtgctttgtaattttaatctctggtaccactggtattggtttacttattaataaaatatatatatatattttcagccttccaaaaaaaaaggatgagagttggagaaattctgcacttgtcactgctatggtgcaatctgtgattcgcaatacaaatttattctcaatccactctccaagtaactcttcctcccacataaataacagtcttttccaccttcaatatcatctcacacctctatcccaccagctccctgtatcagccacctaatgacgaatttgtctaattctctgtgaggtaggttacaagttaattagtcaattaataagtttttttttcttctcttctcttaatatttgatgcataatcataacaaaaagacatcaactattcaagtacaatctcgattgacgtatgtacgaatgatctttgtggggtggttgggggcaggaaataaggatagatgggtgggccattaaatcattgctaaatatctatgcataaataaccagttcacttggcacctttgtggtcacaagctcacagagaaaaaacactcattccaatatagaaaatcttgaatcatggtttcattaggtgagactcagattactcctaattgggtattgattctctcccctacaatgagtctcatacaatgcaatacagaacagtcaaaaccagccatagaaaaagtagaatccaatccagcaatacaaccatactgtaatgtgcttttgaagtgcagcattatcataaaaacatatgaacattggttttattattacgaattgcataccataattttactgttatgcaggcgttcaacaacaatgagtgcaaagggataccataattttcagattcagaacaaacgcacctttgtgtacttagtttgagggtgtgaccttcttctacttagttccaaatagcaccctgcagttcaaacatgtatactatagtaacttgtttcacacaattaatttttttcaaacactactaccgtaacatgaacaatgagtggaaagggatacaaattgggaaatagggtttttgttttatgttaaggtacaaccacaaacaattcaaatactaacaattaaacacaaaagggcaagattttcacaaaaaataccaagacacaactcaaaatagtggacatgcttaccttcaccaacactggaaaggtctgaaaaacccacgacttcgcctgcgtcgcggtagcggtggtgggagcagcgggtcacagggacaagttcttcacggcgacaacctaaatctcaggctggtagcaggacggacttcacggcggtgctaggtttttcaagggttgcagtcgaggcgctaggtttttcgagttgtaattcaggcaagcaagggcgctggtgctttgttgcgagaatatataaactcaaaaatctacgacggtgattcgtaacaccgactttgtatttttatttctacgacggtccagccatcatgaccgtctttgatgacttcaacaacgacgggcttaaatacaaacgtcgttgaacatgaaacgctgcacataaaaactttaataattacggaattgccaccgtgttgacaacaacgacgggttcttcaggtccgtcttaaaaactgtgtcgtagaaaggcctttttgtagtagtgtatgtgactttatcactattatttccatctattttttttatagatcatgttattttaataaattttaagtctagattcttgtcaatataaaattatttttcctaactttttaaataaacaataagacttcttaaataatctataacaacatttatatacatattttaaattgcataatcttaaaaaaattgattataaataatataataaatttaatacttcatagtttaatttaataatactttttaagaatataaaaaaaattaaaaacctaagatgactagattcacaggcctaatctcttgatcttcttaagtatatatgcgttgtaaataaataaataaataatacacacccctttcatagattaattcacacttcatcttcaaaaaatatcatgacatacattttaatgtagacaacaagttctatatatttggggattaaacataacctcagttatactcaattgagtactcaattctattcacatatattagccgtgtctctttttataaacaaacaaattcatgaaatttaggcaaagcaaccaaaggtgtccgtgtggcaaaataggtgaagttgatgccaattgaatctctgtcctctagcatctattttattcttctatatagctcacaggccaaacattgcatttcataaaggaaattattgctcctagttaacttcaaatgattgcatgatatgtaatcatctaaatctccacatggcataattattgggaataatttcagatgatgaacttgttgtagtgggcaactatatatttacaaatgtgaaattcagaatcaatgtgtatcctaatgaataagtagtatatacgcagttacccttcataataattatttcatccatgcatgctttacactagttattttaaatgtcaaatgcatataattctatggataaatacgttgtagtatatatatgtttttttttaatggactaatatgtaggatatgcttaaattataacatgtttttagccctgagtgtgtatcaattaacggatgttttaacttaattagtgatctcaaatatttaaagaaaaattttcattgttcataataattttactttaatttactacaagaggattagtaaaagaaacacatgtggtaaatataaaaaatgtaacttgctttttccattagaattttttaaatttatgacgttttaattgtatagttatataatataatttattatattaagttttaaaatattattaatcaaaattaagaattgtaaagattttttttaccttaagttatatttctttttagacattatttgagttaaaatcttcaattcagaaccacgacacacaataaaattcaaaccatcataacattctaggtgaagtatcaagggtcgctgtccatattattacaaaaaagaacgctgttgtctaactgtgtaataacattactactggagtaccttaaaaatttcttttgctattgatatgctgtgccgagtaaaagtgatgcttttttataaaaataaaaaagtaaaatataaccgatcttcttaaaaatttctttgctattgatatgctgtgcccctgattatgtgccatatatgaagattaattaaaccacaataatttcaaactatctaataatttttctaggtaaaaacatttgtcaaaacccttaattagacagaccgatcttaaaaattagaaacaacctgaaaacttgactctgtgtatctagcaagcatgcaatgcaacatcaacatggttcaaatattttgtgttagagtgtgtttgtcttctttaatgatttctatatcatgccctaatcaatttaataaaaaaaatgtttgtttgacctaatcaccgaagataagggacaagtgtgagtttcaaagcatacattatttatataacaagtgggcaaattgcgtattgaatataataaacgagtttttttttcatccttgtactttgtgttcttttcgctggatgataaaagcatgcaaaacattagttggattaaccagagaaattgagaaaagagaatttctacgactacaagtaaatggaatcggtactaattttatactaaaattcgcttctgtcaaggattgttaggcttcacagaattaatgtaaaaatgaatatgctcttgttgcaatcattgatatcaaggatattaagagttataaggttaatcttttggggaaaaaaaagaaaaaagaaaaaaaaaattgtatgttcaattcgctctattaataaaaaaattaacaattaattattaatatttatcgataaaaaaatatatcaattattagattgttgttgccattttttagtttaatgcaaaaaaccacagatatgacttgaatgccaagttcataattaatatataagctatcgatataggtaaagagtaaagactaataatcaaatcaagaataatgtatgagatctaaaaaggaaacaataattaattatagccagtaccaagataagcattgtttcaattggtgttcttatcacaaaccttttgagaccctttttataatctttttctccttcaaagtagcaacttcgataacttttaaaatgcgtggtttagtgatggttccagtttcagccatgactcgtggctcaatatataattaatcactacatggcctatatattatctttgtacgttataccgttgagccaaccatcgacttccaatagtggctttgcttagtctctgaattaaatcaataagttgaaacaatttgttttgaatatataagagaatcaaagaatagcaccatcttgcaaactgtggtcttctcgttagatttgatggctacgtccactagttgttaccaaaatttccaacaaaatatctgactttataatacgtttaatatcgaatggttgctcccatgtttctcattcaacaagctatataattttgtttcagcttcatacataatattaacaagcatgcaagtccaaaattttgttataaaatgcattgattatttcacttgtcaaatgataatggtacttttatgccttgcgtaacgcaatactaaagcgtgtccactggttttgagtttcttacattattaaataacatgcaaattgatggatgacgtgctatggtttgtgtacagtgtgctacatttctttatttggattttattataatgtcctaataaaccatgaaggataacaaatcatttgtgtctaatcaacagcttgtcaataaagtcaaccagaaacaggaaaatggaaagaaacagtggcttttgggaagttttagagccaaacaatcacatgaaatggttggtttctgggttgaaagtaaagaaaatgttacatagagtaacagcaaatagtatcatttgattgaactggccacaaaaagttccatataaaacttgatctgatcaatagtctggggctacaccagatcaattgtcgaatgaatacagtgcttaaaggaatagctaaaagcaatagctttgttaattgttatctcttttattattcttttaatgtattctatgattttggttatttatatcgattgacactgtgttcatgtcttttaatgctcaaacaacttatgatcaattgcacaaagttcaatgtttaaatgagtctctctcaagagagaatagagaaattattgtatggtcagaaagtttatgcattagatgactctctctcaggaaaaattattgtatggtcaaaacacgtagtttcaatcaatcttcaaatacatgtaacacattttttaaattattactctgtattacatagattgtacgagattatatagttatagaactagataatataataatttctcatctcaaggagcacacatagagatgctacattgctacttttaatttggcatcgacctcatccctcaaatgaaaggtgatcaataaacaaaaattcagtcaattcacaaaacaaatcacacatggtaggtgggaattaagatgacaagtgaatagtgtatttaagtatcactcacttcatactaaatatctcagcacccaaaaaataatgtttctgccacgatgatatacaacggtgcaacttgttctagataataataatatggcccgcacgagacgaagacgctagattttgacagaaggcaatggtagttccttacaatctcacttaatccttcagaattgacaagtgtattttttccattaaaaaaacaatgtaaaaagggatgccccctacaccaacactcaccatatagatccgtcactaattttatttatttatttataacccaagacagctttcttcagctatagtagtgttagtatgaaaaactaaaaatcatccttccagacctcgagtaactaaaattaaccaattgtttgtatttagccatttaattacatatagttaaccctttgttgaggtagtaggaagtaaataacttactattttatcaattttacttaactaatagtataattagtacagctaagccttcaatggttcaagactcgttggatttacttctagttggagatgatgggggtgaaggtggctcgagataacataaaaatgggggtacctatctacaatagttcaagtcatattgaatgagaaagcaaagtaacaacagtaggaagagggatctacttgtagttcttgacttattggaatgctatatttgataggacttggaggcattcaaacgtaaccacgagataaacctgaaacatggattccctcaagtacttaaccattgctggaacggctaatgtgagggtacgttgtaacaagatgtcggaaattctttgatttgagtgcatgaagcattgccatgcaagacatttgggagttgccttttatcataattccataattgctcttttgacgagaaacaaaatcaaatcgtaattttgttgtcaatatagggataaaaaaaatacaacaaaagtaccattatgttatataattatgtttttgttatgtaattttttatttttatgtaaataatagaatcacgattttgttatatatttttttattcccaaataatataacaaaaaccatatttctgttatattaaaaaggtgtgtaaaaaaaatatacaatgtaaatatgattttggtgtgtattttttacaattttttaaaattaattttaaatgaaagctacctttttaaaaaacaatcaaattaattgtgatataatttatcatttttaatattaatttatatattttttaattaaaattgaattaattagatagaagttaccatttataaacttaaccaaactaattattatatgaattacctttattaatattaatcaaattaatttatgaatcaaatttgtattatatgaattagctttattacttttaagaaaatagtgaaagagaaagggaaatggtgaagtataatgatggaggagtgaaaggacaatgatctccttttgaaaagactaaaatatcctaagacctccctacatgatgccacctccttcacccgcgatgataatgacctcgtccttcacatcatgccacctccttcttcacctttccgtgatgacaacgacctcgtccttcacatcatgtcacttctttcaccctcttgtgatatcagtgatctcgtcctatattgcaacaacccttgcatcctctcgcaaccacaatgacctcttcctcccccacaacaacacttgcacttccctcatgatgcctcgtcaccacctttcccctccttcctttgcacattgccatctatgggttttgggtttgtggggatgggtttctggtgtgggaaaggacatttgatgtgaaacaacaatgtcgattacttttggcttatggaaaggccactccaaaacccagtataagttttagaataaccattccgattaattagaaaaactattccataatatccatttcgggtagtgctatatatgttttaaaataattatttcaaaagataatttttattgaggatttattgaggatttattcctattttggaaggtaatttttacttttcaaaaaaattattccaaaataattttggagttcctaatgaaaggctattttgtccatacaaataaaatgagaaatgcaggacacgagttgggaggtttaggattcaaatgccctcaaatgctcattcggccattgtcttgggcctatctcgccttcattattagagtgttcatatgcaatttccggaacaaaaatacgaaagtaaaaagcaaaccattagtcaaactagtttcgtgttagtgaactagttgggaccagattctaaatgactgaatataaactggttctggttcagaaccagatctgaactggttttgaagttcaaacctgttctgaactggttttaaatcatctaaaacctgttctgaattggtttaaactgctaaatcaatcccaaaccagtttcgttcgcataataatatgaaattgattcattgtcaggcaaacaacaaccttatttctcaaaagcattactctgaataatcctcagaaacacctgttcaaatttttacatttcatttgtttcgaaactagaaggcatgtttgtattacaaattataagctgcgaataatttgaagatacataaacataattacaatccaaaacacagtacacttttgtttatggtcaacatcaggactggtgactcgtggtatgaatggggatagacaggacccataacagaagtaatgattgcaagcagaacggagcaaaccaccacagtggatgatgcacgatgactagggttctggcgccccatgataactgtgttatgtgtaaagatggatgataacccaataaacaaaggaaagcatacaaaagtgcagactactccgtgaaaatttattatgagaagtatactcagccacgtccatcatcttcggatgccttggatgtaaaagcatagtcggtgtaaattccaacaagcattgagtaagcttcggaacatggcaaagaatacaaaaaatgtgctgaaacaccaccataccatccaaaattattcaattctatccatcaccatcataccaaacacctttcccaacagaggcattcacaaacttattccctgaaagtatcctggcaaagaataaaggattcatttgcagccaatcttgtaatagatgtttgatacaaactgggtgttgtaattcttatgaacagaagatcaacagagagatgaatagatttgagggctaggtttcaattctagctcatttgtgatgataaaacaaatggttttatgtaatgtaagtatgtaccttattttcgcttataaactggtatatgtacatggttcaggtcaaagaatttgttatataaaaaatggtttaggttattgaaactgtttaaagaatttggttagttatgatattgttggtttgaattcctagctcacatggcaggaaactgaaggattttgtttgcgagactaaattaaccaagagaaaatcctgcaaaacaaatatagtacagaccattcgtcaagtacatcacagcaattgaatgacagcttcttaaagaaacctctgtcctgtagtagtaaattagtatcaaaattcagaaagtattgcaatttaatgtaagtaactgatatttatgaaaatgcagatgagttgccttacatgtctctactctatgaacatccattcaagtgaggcccttgattttccaacaagatgcttcaaggttaaagctgttctttatttgccagtgtttccttctataaaaaaaagttctgtatgtacaggcaaaatgctggtgacaaatgagttgatgatcgcatggataccttcctccaccttaaggcagtgattcctctctgtaaatgaaacaaacccaattatctattctaggttgaagatcttcgttcgcatcagaggtcatcatcaataaaatcccccaagaaagacaaattcacataggttcagtagctcccacctccatgaaagttgactggacatcttttcatgattaacctggtaggtcaggtccgaccaaatggtccaaatcattacagatcaaaccagttagaatggtgagatgcagtgaaaacaggaatcttaacttcatatctactggttcaaaacttcagaagtagaacacgaaatttcagaattcagaactatatcaagagacttctcgattgcaaaactgaagaaatgtagctcaaatagattccccaaatactcagctaagatttcctctgcaacgacacattatccacacaatcatcatcctcatctcccaaatcaacatcggagcctatatctgatgtcaaatcatcctctgcatccttatcccgccccgaatcatctttgcccttaaagtcttcacaagcatcctccacatatgctctagttacctgccccatttcatcctctaacctgcttctcctatacccaaccaactccccatcaaccttagccttccgagggctcaacaggacaagctcggccagcttcctccgcgccaaatacaactcattcggctcgatcagctcgcccttcctatatgcctccctaaggaaaacagtgtgaagctttccctgattcccccttgtggagacataaaaaatcccctggtgctgcagcaaaaaatccttcaacttcttgggcaggttcatggccatccggaaatgcgcaatcctctccagcgtaatcttcttctccacagtcaaggacaacaactcgtgaatggtggcaacagccctcttctccatcctcttctgggcctcaatggacctcaaatcatacccggaaacatcctcataaggggaccaataaggaagcctctgccacttccacattgcaatcctaaaatacttaccaatcttaaaaccaggtggaaaatcaatcacaaaagaaaacctaatatcctcagcatcacttcctctctctctataaaccctttccctagcttcctcaattgcacaagttcctaacccagggtctctctccacaacctcaatgtacttgttcctagtttccttagcatcaatcaaacggaaaaactgagggtacctcagcaccaccgagttttcaaagtcgtccgggagcccatacgcggcgcgtgcgatgcgcacgtgctcgaggcggaggcggccatggttcgacatcatgaggagcttccggaggcgcgtgacagcgcgtgggagctccgcggctagtgcacgacgctcctgctcgatctggaggatggccttgcgggtgaggcggcagaaaaggatgcgctgcacagggtgctcgaagatttcgaacacgtgcgggaacttgaggacgaacgcgccggactcgtggcgcgtgaagccgaagcgccgcgcaagcgtctcaaggcgcgagattgggagcgattgggaaggttccgagaggatgaggttctggaattttaggaccttgcgcgttttcttctcgacttccatgtagttgtcatagccatggtcgcgaaccctaagttgctttttggggattgcggtggattgcgagaattctctgacggagttgaaattagggttgtggattagtagaaagtgctcgacattgagcttgaagagattggaggttcgagaggcaaagactcgcattttggggatttagggtttctgcgttgagtttttggctatggacgatgaatggtgaagcagtgaagtgagagctggaagggacgggttggggaaataataataaggtagaggggttataatgaaattatgataatttttttgtttggggatttgttttttgagtagatgggcttaagttagaaggacttttttctgggtgatgctaggtgcaccagcattattatttgtgcattaacaatttttttttaatttcctaaatgctcctggtgtcttcttccttttaaagttggttgcagtgttactttttctcttacgcctccattgttttttcttcgctttctccctctgttgttggttcgtgttggtttttcattgttgagagagttgttccttgggttgaggtgaaagtgttatgggtcagtggtgattgttgctttcgtcgtcgtccacatttaaggtacatcattttgttgcattttactgggtgtgcgtgagttgatccgtatgtgtaagttataagtatcgatcaaaatgattcgtaagatctatacgaatcaacttgatccgtaagttaaaattacacatacggatcaagttgatccatatgactcatatgtattaactatgactcatatggatcaactatgattcatatagatcaacttgagtgaatgacatttttgtctatttacttaaaatgttaggtgcacctagcatcacccattttttctccatggaagcccaaatcatggaaattacttcttggggaaatacctaaaatgcacccctctaactttatagaagttaaaaagcaacgggtgttagtagtaactttgaaaaaactaaccaacaaagaagtaacaatttactatcagaattctttgatgagaaacaagaagaaataaataagaataaaaatcaatccaacaccttgcacatgtatattaatattgtacgaaaatactttagaagttgttcaatcaatatagaagtctaatctttgaaattgccttagtgcaaaagaatcatacatcaaaattcaacaataatttgattattccctttctccttctcttaatatcttattaagaaataatgtaataatatgccgtacattacattttttaatgtggtcattttgtttatattatcaaaatataattaactttttctaggcaaagatgttctttgcttacgtgcatctatgcatgaatccgggcgtcaatgttgcgtctgtgcgcgcctccatgtccgcatttgcatttctctgagtccatacatgcaaacaaataaatgaagcaaatataattttgacatgaaaaaaatattttaaaatatcatcaaattatttttagaagtttcaaatattttaaaaaaattctttagtttatttttacttcaaaattgttgatcattccaaaaacttcttacgcatacggcacacgaatcacgctatttgttacaacttctactaagaacattgcgaaaagcaaagaaaaaaggtccaaaaggttgaaacagttacacagaaaacgtgattcagtggaaattcttgccaacacacgaaaattaatgcaaccaacaattaacaaaaggttattgctgaatcttataaaacggttggacatgacatgttttcgtgcacattaaagtttcgtaaaaacgacattgttcttaacaaaaatctaataaattaatccaaataattgtgttttcataaactataaatctaacgtgattacttaattccaccatctcaaaaaagttaccgactgaaaaaacacaaagatgaataggaataagaatttggttccacaagaaccgcacaaagagacaaagcaataatcaaacagtagaattagaaacccggaaaacatgaactaaaatatgaaaatgcattcaagaaatgaagattaacaactaatagcaaagttgagcagtttcactttactattaagtaaagggtgtaagaataacacacagcatatccttttggacaaagtaaaagctaagacttgtaacaggtaacgagtcaatacccgaaccaccacaaagcattcacggttggttcgttcttgactcaaacccttttctgcctcagcctcagcctctactcttgaatactctatacacccaaaatataaaacactctattatgttttctttcaaaagaaaaaagaaaaaaaaagtctttttgtttgtgatcatatttaagtctaaaattaaagaaatggatcatgcaactccaagtgcatctttgaccttctgaatggtaaatgagatcaggttattgacagcatcaactgactccattgtgaacttggctgattggtggttgccatttggcaacatttgtaacccaactgtaagcaagcagctgccaccaccgtcactgccatcaccgttgtttgaagtgccatctggcagaatagcaaagcctgatggacggagagggacaaatgatgaatctccacagctcatcaccatctgcaaggcttgcatgttgatcggggaatacactaccatcgagccagaggcatcactccatgactcttgcagatatagcacattgcactcgctattagcagactgcaaatatgacaaaaggaagagaatgttaaatgcaaggtgatgtttggataaatttttcaataagcatttacaggagaaaaaataagtcataaaatagacataggaaaagctttaccctcttataaacacagcaaataattagtttggcttggattagttaaagtataatgtgattttttcttattgaaaggtcacaaaaaaccaaaaccaaaaccaaaaacaaaaacatgcaaaggatgtgataggaaagagcacttacatgaaggatggaaacacaatttccacggtcttgtcctttagcaatatggagcatctccttcattggtccatctttggacagcaggtcccactcacctctcaaattttcatcacgcagaaaatcaaacacccttttccgtgacaccggcatccaaacagaagttgaagcactcagcacaatgccaggagcctcagttgggtcatcgattttccgggccatgattctcatgtcatcagccagattaccaatgtgcagtatgtcccacttgcaagcagatgaagcacagatccctgagcagaagcactcggtcatgcgttgtgcgagcttcatcatgtttgtcctacccgcttgggctggtaagaacagcattcatcaaaatgaaaactttgccatattcatcaaagtaaaaaagtgtttaaggcagtgacaatgtgacatacctgtggggtcctcagatgggccttgaggagacctgaggattgccaagcagtcacactgccttaggagggtggcaatccatctctgagcaccaaaaccaatgccagaactaaccaatgggcgataaagttggtggatgacactctcatcatattgggaatgttcaacccaagtaatctacaacagtgtaatttaccttcagtcaatctggtgattattacaaattcaaagcaatatatgaaagaaattttaagatatgcaaagcctagttacttcaacaaagtagttccagtattattttcatcaaaaagaggacaacactgatctcttaatcactgtagatgacttgacaagaataaacttcaaatgcaaaatctaaatagaaaaagggagggattccatcaaaaaccttaattgagaaaaggtagaaaacattgcaagatttaaacacaaatggaattagggaggtttgttgcatataataaccatagcccacactcaatatttgtaaaaccctaggtcaatattaaattaacatcccaacttagaagtcccttgaaaggattaaaaaatggaacaaatcaaaaggttatgcacacgtgaatcacaacggacttaaggattggtcatattaaagggcatgaattaccacattaactggcagtggtaccatatatactataattggactggattcacatcatcactatcatacagagcaaaattatactatttataaaagggtgcagaaataaaaagatttaacttttccaaaaagtagactccgcacttcagagtgtaaagtgaagagtgatagtctttgagaaatcaatagtagagattttggttaaacatatgcgcatgcacaaaaaattgaaattatgacattgttacaaatgacaccatgaatacttcataatatagtgcaggcatgatggaaccaagcacaagctcttgctaaacttaaatgtcagccataacaaaccaatccattcatactaaaagtaataaagaaatccaaaaatatatttttaaatattgaaactccagcaagcatgcgatgatgcaattgcaatacaaaagaaaataagtgtctaaaatatcttattatagcacttacattggaaaaaccattgggcatgtcctgaataacacagcccgagggaagcctcctgcagctcattaatggatgtgaattggtaacattacgaccaatgtcaactgaaacatcaaccacagcccataaaccttcagcgtgcttcttgcaaaacctgaggaaactcacttgacgagcagggactagtggagaaagcaattgaacctcagcaagcatctgaaaagcattccataattagttgtagccaaatatagcaaaaccatacacacatcagagaaacataccacttgcaacgctccacttctggttccacccgtgccactagatagtacttccacagtggcagcactagcaatcatagatgaaaacatctccgaccattgatcctgttggcataaatgataaattaaaaaaaataaattcaactgagacaaatttaagatcaaataaacatcatagtcaatcacaagttattaacatatcaaactgttctacgataaaattcttcgaattatatgccatattttatgaactagaagataaatatggcatacaatacagtgaagcttcttttgaatttattcttgctttgtaaatgactgctctaaatctccaataaaatcaactaaaacttcaactaagaataagaaattaggtatcataccgcatccatcaatatttcaacaaggcccaaactgctggctgatactactccagttcctcttgtagcttcagtcacataaccagcagcaggttttgatccaatataaggagaaaacagtcttgcatactcatcatggttcagtacttcattcctgccatcagagcttttaatccaaagagaggtatcaggctgagccatcttaattaattcattcatagcactcagtgcaaggtctaaaagcatggatctctcaagctggatttcgtttcccatcattcccattggtgatctagcacccatagtagacatcgcaggagaggagcccaaagctccatctcccacatcaaatcccattggcaagggcatgccaaaattgcttgaaccaccaagtccgtttcttccaatagcaagttctagaccagaatttgagggtggcagagccatgggactggccagtggtgagaggggccggcccaggaacttgtttgccaatgcacatattcggttcaattcatccttcagtcgggcattttccattctagtttggtgctcctccaatgaaatttgaccaggaatagctgggccaccacagttgttacatatcggatttgccaaagcatccttcattacactgttctcagctcggagcttgtcattttcctgcctaagaatcatgttctcatggcgttccagttgtgtctgattcaagaaaagcaattcatttagtaaaacatcctcaatggcatcagcaaaatgtataaatgagaacaaataccaatgtatgccaactggaaccaaattacatctccctacccccacccccgattttcaattgcggttcagttttgtagcaacccttgatattgtgggaagccgggaacttgcggacaaatgcagttgatgcagtcacaattgtgatcgcaatacaatgccacccaaaaaacttgacattgtggccaaccaaaagaagtaacgctaatgttactttttaaccacttatcctttaattaaagggacaagtaacgaagccaagtgattgtcttaaaacttcaaccatccccccattcgccccaaaattaggtaataacgcttcggccgaaagaaataacaataacgttacttttaaccacttatcctttaattaaagggaaaaataacggagccaagtgatttttataaaacatcaaccatccccccaaattaggcaataacgcttcggccgaaagaaataatgataatgttactttttaaccacttatatttaattaaagggacaaataatggaatcaagtgattttagtaaaacttcatcctcccatcccccgcccccaaattaggtaacaacgcttccgccaaacaaatagcaaccgataacgataatgttaatttttaacaacttattctttaattaaagagacaagtaacaagtatcatagccaactgattttaattagttccaacttaccttcatttggcttccgccaaacaaatagcaactgataacgataatgttaatttttaacaacttattctttaattaaagatacaagtaacaagtatcatagccaactgattttaattagttccaacttaccttcatttgggttcgtcgattctgaaaccagaacttgacttgcttgttctccaagccaagcctcttgctaagatctgttctttgcttctcgtcgggatgaggacactccttgaaaaacctaaaacaaaaacagcaaaaaaaaatcaaccttaacaaacaaatcaatacagataatcacagtttgtaaaaaaagatttcagaattttatagagccatacgcttcaagctcctgaatttgttgaggggtgtgcctatggtatttcttcttctttttatgtggctgatcatccccagcatcttgatcatcaccagatccgccatcaaaattatcacttccggaccggctttcatattcgtcatccctcatcctccctagcaaattactagtatcaaaactttctcccattagacccatctcgctatggccttccattctcctttgctgcagaaaatagtcccattagcaacaataacaacaagaaggatgagtaataagatgcacaaatccaattcataatcaatacaaaagcaaataacaaaacatgatacataaagggagttctaaatcaaaggggagatgaagcatacaacagataaattcaaggtagagggattttgctttgaaatattaaagggtgaagaaaaaagaggtggctccacagtgaaaaaactagccatgaagcaattcgatggagaactatgctctacaaccctataaaaagttatgggtcattttctctcccaaactcccaaagtttttatataccgaatatgcaagtactctctctattctctatttccttctccgacccttttgttctccaggctctattctgaaattgtcactatcactttttcaggattcttcgctcaactttttgaacttaaaccaaaattgagtcaaatgttcacaacattgatttctttggaaaaaagatacacacatccacacaaccaaaaactaaataaataaataaaagtatctccttgtcaacgctccatgcatgacttttaactcattcctctcaatagaattaagccattgacagatgcaaatgtcagaaagaacaagataagaaaaaacccttttgttttctgacccggtgttcacatctgtttctccaatttgcacaaccctccaaatcagaaaaataaaagtaataaataagagtaaatgcccttaaattatatattttttttcatcctgtgtttcacacctggcctgactaattatttgtcagcactcaaaaaaaatttcataacccaagagggtctattgtgccaaagtctttgcacaagaaacaaacacagcaatatagagcaaggacttttttatgaaaaaagacaaaaacgaaagcaagattcacacactgaaccttacttttgaaatgcatggtaccaaatcaaaaagacccagttgactcatccccatccttcacagatacaagttcaaaagaaccaaactttatagaaacgaagccaggtacgaagacaaggtgataccttttagtttagcagtcccaaagcaaaatgccagaaaaaaattctttttcttttgtcttaatttttcagatccttggaaacactctctctcaaacacactgggatctgtggaaggaagagaaaaggacagagaaaaaatattttgtgatatgttattacaataacacgatatatttatactaatataatataaacaaatcaagaagaaaataatattttattttatttaacgctaaaagaatagcagagctgacttacaatgactcaaggcaatcagaaagtcaatgactttttcaactctttaaattgaataattgttttttcctaaattaaaaaaaaaatagaaactttgaatgaaaattcaagacccaattcccatgtttgaatccaatgttctattttatgactatatcaatgtctgtgtctttggttgctcctcttctcttctctcttcggtcttcactcttcactcaattgcatgcacattttctctctctaaatcttctgaaatgtgattatagttactttccctattctttctctctctacatattctcttgttttacttcggacatttggcaatatataggacctaaaagagagagtgaaaggcgtgtggggcccactgacaaaacaaaacagcggttcgtgatgttcgctctcaccccagcgcgtgaaacacgagcgcgtgggatgtctgtcctttgacactgcctggtttttagattgctttatctttctagggcagtaatatggtgtgcgtaggtccacggtatcaccgtgagaccggtttaaattatccaataaaagggtcccgcgttcgagggcaatattgatattttagaaaaaaaaagtgtggttctgtttgtaaagaagaggatttctggcgtgattctgggattgaccaaaatccgaatattcaattatcggattttgcatttcatttcctttttccgtttccttttttttaacggaaaaagaaaaaaataataataaaaaataaaagtatcctagtatgcatgcaagtgtgaatttgaatcctattttttactacatttgacgttgatttggataaggaaacaaaatcacaaaatcccctttctcgtgtttcaactttttttaagaaggtaagaaaaagacttgcttcaattgttcgtgaatgccgacctctcgactcttttggtttcttttaatttttgtatgtgattttttcttacaattttttagtttttaaaaaattataatttagttgaatctttaattttacgtatgttttatttattttattccaatcaaattaaattttagacctaatgtatttattgaaggtatatcaataaaaaatatcaaatttagaattcaagtaaaattataatttttaaaattagaggactaaaattataaataaaataaggaaataaaaatgatagataaaaaatgaaaagagactaaattgtaatttggccttttattttatatcaatgttagcataatacatacttttatattactataatttaatcatttgtttatatattacttaaaaaatgagttatttatcaaacgagggcatctcaattacacacattaagtttgttgaagagaacatgtaatcaatccatgtataatacattgagacatgataagtttaaatatgattaagttttggatttgaattgagaattaatttcatatccgaaatacgactgaaatgtatgagaataccaaagacactaattaggaagatcagaaaaaaaaaatgacttattaaataacttttgtgcaatcaatatttttgacaatatatttaatactttaataatataataatataattaaataactgttagcatttaatattttcaacaaatgaaaacttattcttgaaaagcaagattatatttaatatttgtttacattaaaaaattaaaatgcatgccactcatgattttttatataaaaataataatattaagcaatcgatctgactgggtggaatgatttggaaaatcacatcctaatttctaaaagaaaatcataatagaaaattcaacaaatcatcccaaaattgacaatccaatctatatatattgcaacatgtttacttttattgttcgaatctacaatctagcgtggataaaatgatttatccatcatcgaatccttcgactatcgatcaataaccatgcacaagaatctttctcagaaaaaaaaatcaaatcctcggtcttttttcaaatatttaatctttttaactttctttcatgtatataaaacaatcttaaattactctctttcgtcctttttcattattcatactttcattccatttcaatcatctctactaaacacatctaaatttgaaaataattattggcaaactataattaactattagaaatcacacctttcttatagaaatatgtttttaagtagtttaattagtcaaagacacgaaaataagaaaaattagtaaaaagatggactaaatgttacttcttattttaatttttatccaattcggaattgaaaaataataaattatgttcgaaaagtacttattttctaaaataactctttcagaagattaataattaagaatacaatttaatttctatatattattagtataaacttttttaaagattttaaagtactaattatttctataaaataagttaagtataatatacactaaattttaatagaaacataatatacttcttttttaccacaaggatatgcaaacaactttggtcataagaaatataggtttttaaagtgagattatagacttacataagtctctctctgattagaagagaaagtactacttaattatctcagtttaaaagtcaaagaagaagaaacttccttgttaacttcttcttgttgaccttggagaagtgcatgagtaactaatttaattagattcaaggttatgactaatttaattacatatggtgcattcaggaacttctatatccctctaaatcttttgttcaagggagtagctagacacgagccctataaaccctcattatgtcaactacaatttcaatttccagaagcttgtaactgttggtattacgatcattatgccgtacgagttcgaacctgagccgagggacggatggcaggggctcgccagcagaatgaagctttcaaattgcaagggtgagcacacaaatgagtcctttacagcctgcagcaatgctatggagtttgtcacatcatcatcgtctatgaattcaattcaacaattgatcaaaagaggattcaaaaaataacattcagatcacttaaatttcaatatttttcattccttcatcccaattatgttcttcacttagcatttagactgaataattttatgaaattacttcgttacatcagaattatgttcttcacttagcatttaaactgaataagtttatgaaattacttcgttacatccacataatacgggtaatgtaggagaatggtaacggccatagtgaaggagtaagtcagcatggtgtcgtgcctaggtggagaaaggagggggagtagttgtggtgtagggagatgaagctgtgggacagtacatgtgaagggttcctgcccaagaagcccaagtttccctggttggaagtctcacaagcttgttattaattgcgagagctcattgttcgtgaatgatgatgaatgtgtatgaggacagaagatgtgtatatatagatagatacattaatactttagagagtttctatgctgtccggaataatttggggtttttttatactattaattttttagagttgaaaataattaaaaagattttagggtttaacttataaagttatctttaattatatttttttatttaaaaaagttgtaattttaaattttaaaaaaataataatcaaggatcaatttaaaaaaaataatgaaaagatgatatgcaatttgattgattaaataatttaataatatcaaaactccaaatatagaaattctctaatacatattgcaagaattttccttttcaataaactataccaagtttatggaaggatgtgtataatacggaatgagagaaagaaaagtgtgtaagatgagtgacaagtgaagctcatattaatttatttggtggagggacttgagggtggtgtgtgatggagagtatgaggggtggtttgataggaagattgagtggaataacaaggatatgaggaagactagattttgagaggatgctgggatgggggaggagtattttagaaatatgattcctagaatgtttttaaattcagaaaaaaaaaaaaaggagttggtatacgtaggtgatatgggaacttggaacgagggtacggggacatggggttttacatggagaagaccttggtttgagtgggagaagaatggtgtaggatggtaattgtccttttgagctgtaattattattaatacttttagagcaattattagttcatttcttttctttggggcttgtatttgcttttttgacttaattttggggaaggaattagaatagatttagatagttgtaattaagcatttttcctttctttttagttcaatttttgatgaacggaagaagttgggaagacaagagtttagtgaatttgaagatttgaagaaacattgatgcttaagcactggttcaaacacgctaaagcgctaaccccaacacattctagatttgaagtagcatcgacgcttaagtgttggtccaaacacacttaagtgccaatttcagtgcatcccaatttttaaagatcgggcctggcttaagcattatgaatctcaagcttaagtgtcaacccctggaagtaaacatcactcacgcttaagcgtaaagcctttcatgcttaagcgccaattccaggaagtagcagaagcctactcttgatcacgcttaagtgtggggtctttcatgcttaattgttaattcctcttattgcagtccttagatttgcaaaccacgcttaagcgtaactcgtttctcgcttaagtgtggcgacacgtggtagcagttaagagactttttaaaagcctatttaaagcgaaaagggccacataagacttagttttgtgtagtgttaaaagcattttgggatttcatacaaaccttgaaggctctcctccacgaaaattgcccatcttcatttcttctccatttttcatgcttgtacttgctatggatagctaaattccccacagtgcttggggttggaatctaatgacactaaacctcttgtatcttatttgattcttaatatatagaagctcatatttctcaaccttttatcttgttttcatgctttaatgccttgtatagactaatcaaccatatcttgtgggtttctctacattaaaaagtgttgttaaacctagacccaatataagataactaaggattactcactagaaatggtgaatgaactcttagtcctcttatgatcatgagcttaatgcaaatgttgttattgattcactgagaaattaggaattgatatcaatgtttaggtttaagtcactaagaaattaggatttgataacatttatggttgaggattgattggttgaaatgtgttgctatactgtttgtcattgaggattgttggtgaagtggagtgaattccacccgagacacttttattatacgaatttctcatcattattactgcattttaagtgttgagtaaatatccaaaaatagagtttcctatttagcttattgatttagtttcaattttgaatatcatttcttaaaccaagttttatatgcaattttattgattctttgtccttggtgaacaatttgtgtatcaattggtttgatatagcacaagtcctttgggagacgataaacttgaaatacttccatacttgtgtgattggtatacttgccatattataaacatagatgagtttcataatttactagatagtgtggtcattagaagagatgtggaggatagttggatttcgacattgaatgcttcaaatgagttcttggtgaagtccacatacatggcactccataatgaaaagttaggaatccaggaggtggatatttattaacgcttattgctaggtaaagtagtccccccaaaggtagtttttttttgttgtggagagttttttcttgatagactacctacaatggtaacgagtcgtcatgttgagcttatcaatggagatgtattgtgtgctctgtgtcacgaatgtcaagaaattaagtgcgaatcatctttttgtctcatgtaaatttgctcatgatacatggaaaagatggtatagcttgctcggcaaaagctcaacactccctcatgcagctattgatcacgtttatcaaaattctcatggtatatggtacattctagcttggacatttggtggtctctggggtggagttcgattatttggaacatttggtacgaaagaaacaaactcatttttgaaaacaaagcaccatgactaagaacaagtgtggttcaaatgcttattcaacatgtgggcatggctcaaagcttataaaaaaggattctctgtgtcgtttcagtagtggcaaattagtccaggagattgtttgttaaagatgtgatacttaatagtgttgttgttaaggagagagagaggtgagagaagaaggggaaatgacaagattaaaatagtaaaattcccttttctatatattaatcaaaatatcaaatagaaaaagaggagaaacagtttataatttttggagtgtgtaagcaaaattatctttgaaaatttatttatcatcctctcccccaatgcttataaagatatattaatattactattatttttcttcccttattgaccaaacaaggaaacttttcccttagtctttattattataaattaaagaattgaaatgtttattattatttagtaattttattaaccaaaaaatttgcaattttgaatctgcaaggactaatcgttgaccatatgacaatatatgttttatttaaaaatttaaaactgttgttttgggctaggctagacactcaattgcacgagtgtactacctttttttttatcaattacgtagaaagctaaaaaaaaaaaacaaagactactacagacgaaggaaaacagtggcatttgcatctgttttgaacacgagaataacatatatggttaactagaaggtctagacccgaagctccctttttagctaacacatcaacacatgcgttatcttccctcaaggtgtgactgatatatatgcacctcccaatggaaagaaagaagactcttgatgcttgcaatcatagcagcgaaaggatggaagctagcgaattgatgctggatcaaatgaatggaagaaagagaacctgtttcaatcataagatgtctgaaacccttgtctcacgcatgctgcaaaccatgaagaatagcaaggagcacggcatgaacattgtggtggttttaccacaatgatcatggtaactcgagacccatcttccatttgagtccctacagatacctccaaaatttgagtaccctgggttgccaaaggagcttccataagtgttaagtttgatgaaggacattgaaggaggttgccaagaaacagtcctgggatcccagaaacttgattcacctgcaactgggtcattatcagggagctactttgattcaaagtattgttacaatctaaactataggaatatttgtgtacagaaacttgtatttcggtccaaaataggttactttgtgtctacactaagatagagatatgttgttttaaagaaacttaaagtcttgtgccaggaaatccaactcattctagattcaaatataaccaacgtcacttcaatagcaaaacatttattatatatataccgccactttgataaaacccctcaaatttaacgggttaaaaattttcgagtcctaaaacctacactaattagatatatacgcgtcagtccaccaatttgtgccatattacatagcagctctgactataatcgacctcactttgttcacactcgctgcgtcttttttggttttgtacaaatgaaatttttaatttttcatatatttttttcgactgatcggtaaagattaaagagtgtgtattaaaaaagaatttaatatatatatatatatatatatatatatatattaccatttgattataaattattatgagctagtcaccctagaggcttttaattctggtttgttattcaacaacaacaaaattactatttatgatagaattgttagattttgtaataataataattattttgactgaattgtaataattattctaaaaaaacatattttaagatgatttgtaattgatattaatggagcactggtaagatttcttgaatggaacactcctaagttattcttagcaaattttattatgttacaataaatttaaaaatatatttcaacatttttcatactctaatagtaaaatcactttttttgaggaatggtgaaatcacttaagaatttaaattaagtctatcatattgcatcacatctttatacatgtaaaaagagtaacattttaaattttttttaaaaaaaactgattttcatataagaactattcttaattatattatgggatacaacccatgcagtctcctctaactgtgaaaaactcattcttgtgctaaaaaatcctgcaagaaatactgctggaaatattgtaaaaatcttcacaatatatcaaaattaaactttgaaaaaataactaaaaattttatagtattgttggtctgtctaacataacgtggtggcatcgcgggtgaagcgacaaggaatatctggttgtttaaactatgaaactaaaactaggcttatagcattagcattagtgaaagttaaaacaacaaataaactcaagaaaaccatgaaagtacgttctaaaaataaaaagtaaatcccatgaaagcatcccaagttcccaaccacaagacaacgtggctttccccgaaagcgaaacaccgcatgccacggccacaatccacaattcctgttaacctaatttcaaccacagagccaatcagaactcgccacgtcatgatacaaataccgtcaggttggtcaacggctccaaaaccacgtaccctgtcacccaacagacaaggactcgttggcagtttcgcgtcactccaagcattgtagcggtgggacacaaacacacgcaaaatatcaatttattaagttaaagtttttttttacctataaatttatttttttatcagtaaaaaaaaaacattaatcaagtttttttaaaatatattattgtaggataatctagtctttttaaaaaactagtatatatatatatatatattgatttattttattttcaagttaaaaatgttttagaaagcatttagtattattccaagtataaatggaattaatttgaccaattactctaagcaaggaattttaaaatagactataatactttttaaaaaaattaaaataattaggttcattttttaatgttatcatttaattacatattgacattaatagtaaattcgttgagtgttataatgattctttaaaaaataattataaaaaaattataattaattaatagtgggatttttttaaactatcaatatataaaaaaaccttaagaatttaattttcaaattagtgacatttcataatctaaaaagtcaaattaatgtaaacaaatttattattattccataaaactaattaatggtacatgtttgtacattagttgagaaaaatcattataaccacattttgtgacttaaaattaaaaaaatctacattaagattccaaaattcacatttttaacgcgtattcaaatattaatattttctataaaaaaaagtacagtacacctaattgaattaaatatgtttgtaattattatgaatactttgatattattgcatttttattattttgtgtaatttttattgtgctaaagttaatatattttatgttctaataggagtgaatattggtttgaggtaaattttttttctaatttaatacatttttatcatattattgcatttttgttgtgttaaatttgatatattgtaatgatttttcttattatacattgtaattacataatagtaaaattacttaataaaataaaatattaaaaattaattactaaactgtaatgtgaacttgaatgttacaaataggaacgaaaggaatatatttttatacttctactatttatcatcatttataataaaaaaattgtaaataaataatataattgtatctatatattttttctaactcaataaattctatcacaaatcttccatatcactttccaaatttttttctctattgttaatttttttctttatttcattatttaattttgggtacttctttttcttttttatatttaaaaaattcatttttacatacttttaataaaatatcataaattactaaattagtttaggacacatgaaaccaatttaaacatgattaatgtgttaaagaaaaatattggatctgctttataatccttcttcaaatcatattttaactattttttttataagtttgttgaatatgttctaaaatatttattcactattgatcaatattatatttatttttaatttagagacatgatttttcttatatatttaattaaatgtattatcccaaactaataaaataacaacaattcaaatttagaagcaataagataacatatattaatgtgacaatttaaataagataaataatcaaaatcaacaaccaattcttttatcctttatctttttttcctaattgtacaacttttatattgatttttttacatttacattataatggacatttattatagggtcatcataacctatcatgcatgacacatgtatgatcttctttctttaatctacaaaaggaatatatgaaggataaaaaaaaaactacaaactaccttaaaaaaactacaaactatgtaaaccaacaaaaaaaattaaaataatccctaataaatgttagtagtcactaatgtaagaaattttgaggttgacggatataaaatcaaaagaaattttaaaattaacaaatatataaaataaataaattcttattttttttttaaatgagcagttcaacaaaaaaaaagttctataaaaaataaaaagtaaacaaaaatggatagttttaaaattaaaaaatatatctataaaatgagttttaaattaaaaaatggcaagttttaaaaatgcatttattattagttggcagatttaaaaaactaaaatgaagttagagattaaaaagaattaattatttgcaaatttgatttatgagaagttttaaaatggacaattatgttaccataatgatacatgaacacattaaaatatgattagttttaaaattaagataatttttaaaattaagaaataaaaaaatgaaaaatgaattttaaaataaaaaataaatgattttaaatttgatttaataaagatgatgggatatattgatgctagagagagatagagatgtttgtatattataaaaagaaatataaaaataataagaaaaaagataaaaaataattatataagaagaatattgagataaattaaaaaataaaattttaaaggataaaataatccttataaaaataaagataaaaaaggtgattaaaaaaaaaaactccttctgttgttatagattcctcattttctgaagccaccggcaaccaattaatcctaagtttggtagtaataataatgcagcagttacaattagaagcctgaaacgtctccttccactgctcggtgacaccaaccttcccaatcactttcctttcccatttccgatataagctccaaacccttctccaccttcttcttcccaactcacccttttgcgttgaaactttgagtctttctttgaaacttttcagaccaaagacgaaaccatgtcatcaacaacacggagagatctagaaagtggaggggcgaacaagaactacaacaacataagctacagtgctgctcccacttcctatgtttacgatcccgaagttcattggacgtcatggctcgtgccgctgtttgtggcggttaacgttgtggtgttcgttgtggccatgtatctcaacgattgtcccaggaaaaatctcggctttgaaggggaatgtgtcgccaggtttctgggtcggttctcctttcagccccttagggagaatccgttatttggtccctcttcgtccacgtaagagctcaattaccggccttttctttttcagtggtttaattttttgtttgtgtttttgaattagttgttttgttggttttggctttgttttggtgctgaaatccggttaatttgatgaattgggtgtcggttttttgtgatctgcttttgtttttgattccgtggcatcaatttcgaactattctcttaatggattaagtgaatttttgtctttcatgtgtctccgtgaacattgagtgtgctaagtgaagtcaatttttcatttttgattaatgaacatacatagttagaatgtgtttttggtctctcaatttccggctaaaattggtcttagttcttataataggtaaaatcattgtattttttgacatgtggtgaattttgtctttctttatgaaacttaggattttagtgtgagctatgagggacgaaattcacccattatcggagataggaggataaaaattaagaccaatttgacaaaaaataaaaaatgagaacctagcacacagtttaccctaaattaaatgaatagctggatttgctgtcttctattacacaatcaacagcgtttttatttagccttttcaattttggatgcttgatttgctgttgatagtttaaaatcacccttatccttttaccctttagcacaaaataaaggcggtaattgattttgtctttggtgtatatgagaagaataagttattgacccactaagaaaaatattttattttaaagggcaaaagaaagatagtattattgataagaaaatgtggccgaagcacaagatgtgcattcaaaaccaccactaaggaaaataataacacctattttctagccttgatgactgggtttttcctttgttaagttgaagttctttggccaaactacttgctagtatgttggtatagagatttcgtacagatttattgatttaatttttgtttcatttttgaagcttaacaaagatgggagcacttcggtgggatgatgttgtgaatcatcatcaagcatggagactcgtcacttgcatttggctgcacgctggagttgttcatttggctgccaacatgttgagcctggtcttcattggcattcgtcttgaacaacaatttgggtttggtatgtttcttttttctgcttatttcaggttatacacaaaattaggaaataaaaaaattcaagttttagttttatacctttggacatggtcaccccatttggaagtgttcatgttcttttgtgttcttcaaattttgcttttgaatggttatgacctgacatttttcaaaacggcagtgaggataggaattatttacttgttgtctggattcggcgggagtgtactatcttccttattcattagaaacaacatttctgttggtgcttctggtgctctttttggacttcttggagcaatgctttcagaacttatcacaaattggagtatttatactaataaggtgttggttcccatcctatttttgtattctgtgtgtttgttagttctttttaaaaggaaaattattaatgttatgaaaagattttgacaaattcctgtattcataatcgtgaactgttatttttttttcttgttcaatcactaaaactgaatttacaaaacatcctggttggttgattttaatattcttataatttgcatgaactaatttgtgctgatttgaaaaacacttttggtcttgtgggtcttttcttttcttttttattcggtccatcaactaggttaaatgacttgcacatgggtaatacttatatggtacatttaacatccatttctaagtttctaacactcttcctctgcattttgcaggcagctgctttgttcacacttctgtttattattgtcatcaatcttgccattggaatgttaccacatgttgataactttgctcatattgggggattcctcacaggatttctccttgggtttattttgctgctccgccctcagtttgggtggttagaacaacgacgtccccctgctggtgttcgcctcaagtcaaaatacaaggcttaccaatatgttctatggattgtctcggccattttactaattgttgggtgagttacttccttaaatccttgaaactcattaagcaatattactgtcatgattcagctgtttttggtataggagatgtaattatattaacttgctatatgataatcgtataaactaaaccttaaatttgatctctggagatgtttttagttctcatggcctgttaggaaatggagagctggttatttgttgcttaatctactccatatcaagtgatgctaattctatcatttgctttcctttccttttatttgttgaatgacaggttatctattgctctagtgatgttattccggggtgagaatggatatgatcactgccattggtgtcactatctaacatgtgttccaacttctaaatggaaatgcaatgacaattaaacaaaagggcatgagctatcgtcctctttatagctatagctacagttcttacaaattgggttgttttgtaacttttttctgttaatttctgtcaaaagtcagttattggtttgactgcggatttatgtgtattataatatataaagaaatttatttgtacatgaaattcatttgtcatttatcccgcccctatattctttgtaatcaccagtctagtgtatttcaatgatagtttggaataaattttacctattcctttgattctcattcaccttgataatttaagcatattgaattcggaaacatggttcaaaatccaagttactgtgtttcagaaaccattaccgacttgaacttaccccaaataaaaactatttcaattggtcattggttagcatccaatgttaaaaataaactcagaaagtttattgagtttacataaaatttgagtctatcaaatttactataaatagaatttatacatgagtcaattcataaaatgtaaatgaatttataaaattgtaagagttaatgggttagttctatattttttattttttttcttctaaaatttaatttttttcaattttaatgaagtttaaaagattatatcttttattaggtctatttaaggtggatatatgttcatgaattattcggtgaaatggctcgagctttggtaatattaaaatattgatgtgtttaattgtagatttacgtgggttgatttgtaaaagttgtggcttaaatgggtttagaatgtgagattgcaaacaatttattcactttcacaacaatgacaatattttttaaaagaattttgcaggaataaaagaaaaatgagaaatatattgggtaggcttatggagcatttatattagtctacatatcaacatcattttctttatacaataagtaagattaaactattttttttctccatgacttattttgaaggtttaatttgatcggtttattttttaataatttaattaggtcacttatttttaaaataaaaaaaatatttgaaggtgacaagaaatatggaatcaaatagaatctgttttaaaaattaagaaacctaattaaacattttaaaattaaagaagcaacatttgaacctaaaaaataaacgaggaaaaaataatttaacaggtgtttagggatgccaatagttagaattaagatattatagtacccatctgcgtatcctttaaaaattcctgtaaccagactcatactcgcgtggacagtagttttaatacgcatgtcctttctcattggattacatagccgtgcatacatgtaccattatttgtactttaactaattatgaaaaattgataataaaatattgattaaaaatataatagtaattaaattaagatcccatttaaaatcttttataaaatataatcatagaacatcgatatcacagatacaccatcattaaaatgttattcaaatatcttttttctaaatataacaatgatattcataaaacatcaacagagaaaattgaaaaaaaagaagctaataaagatctttttaaaattaaggaatgtaacctatttctaagaaaataaagatcatgatctatcttttaacaaataaacaacatgattccttttatgtttggtggattatataacttggttatctattattattattattattattattattattatttgagtatgtgtagagttggatactaagatactcatgaatatttttgtgcgtattcaaatagtacatttcagaatttacatctatcattcaattttaattggattccttaaactaaaattaatttaatccaattggatgacctcatccaacctacaaatatttaattgagtttaattgaatttggctggttcatggattagatatcatctgcttcctgatcgatatactaacttgttagtagtctctatggatatcaagcatacattaatatgaatgtcaacatatctattcctcttttttctatgtgaacagaaagaattagtctaaaaaaaaaatactgctgttaaagacttcacatttcaactaattaacgcaagagacaataaagatttcatattatggtcagattgtgactcaagttgtcaactcacatcctttaattaaaattgcaaaatttaaacaaaccaaccatgaaatcataatttgtaaagtaatatattgaaacaagtacaaccataaaattacaaaacttactagtacaatttttcaattctcaaaacacataaggattaaaattatttccttcaatctctaggaatcaaagataggtatcgcaacttagtcaatcgactgagaacacccggtattcaatacttatacaataccacgttatttgcaatagctcacacagcttattattcatatagttcacacctttatcggtaatttcattttaaattatttgcaattaataattcattgattagtaaattacacatacttttccatagaattaaaaaaattacacatatttctcttccttttataaaacctacacatacctgctcgagattttagaaaattacacttatatatatattagtatatgttcattctttccttgactcaagcatgtatagacctaagttcaatgtttcatattagcagttaattattaattatttattatctatttttatatctttatatattgacgcagggcgatacttaaaagtatatacactatgtctatatctggtgtaaaaaaaatttgggggccatggctccccctccctccttgcaagatccgccattgtatacatggctgagattcatgaaatataatgtttttttggtatatgacaagatagtctcggtgcaggaccttgtttcctgggtcctgttatactgtcattgggctctcagataaaattctagtttgagttagttaattaagacttaatgttaataaaattgtatattcatgatttaaactcaagatgattgattaagttataacaattctactctaattgtcccacacagtcgatgataagaaaacctttattaatagtcatgaatcccaattgttcaggcaagaataattataaacaagtagtaagttgaagaaatcacaaggatagatacgagacttcaatgcatcaaactaattcagacatcaatttctcacttgtaaactcaaattataaaagttaaatatattttttgtcatgtaagattcgtaacgtttacatttaatttctacagaatattttgttagtttttaatgttttattttgtaattcaaaaccatccaaatccaaaagtgacattttttaatctaagttaaaaaacaaaaaacaagaatgcaataccccttcttttctcaccatgccaccccaccaaccatcaacatcataatcactgcaccaaaggccacagagagaacgaaccccaccatgtataaatcgctgcatacttcaaagagtggcatttcggtgcacggagatcttaatctggagaaaaggtttatcagaaatcgattgtgacaatgtgtaatttgatctcattatcaaggtatcgcgcttactagctttataggcaccacctaggttccaattcatccgaatcctaatctagttttaagtccaaaaattaatacattataattttataggaataaaaaataaaaagaaaatccaaacttcatgaactctataaagacaaaaaatatgttttagacagttataaaataatcccaaaaagggtcaatcaaggaccatcatctattaacaaataatataatgttcaaaattttatttcttgaaattttggaaatttgaattgtatttaatatattgggaaattttatgattttaatgagagagaaaaaatccatatattgagcttcaaaggtttatgcattctttatagcacaaattcatctccgctcaagctctacatctaacccaatttttctttccttgagggttgatggaggctattcattccataaattccctggtttaatcatctgacaagtggccatacatgaaaattccaagcaccaaacttaaacagcaaccatattgagtcctatttatcctaccaattattcctaaccctcttaatttatctggggactgttatgccccaccttcatattaattattatgtttggtagttgttggatcagtaaactatggtcttacactcttacccaaagcctctgtcgtattttttttacgaggtgtttccattaattaatcaaattcttaatgatggcgacatgaagcttttcaaatgtttggacctttattttatttatttaggtacatgtatatgtcacaccatgaataaactatatcgtatgattcacgtgtcctcttaattcgttagtactgctttttctcatggtattacatgttcacgacaggtgaaaaacaaatcaactaattcatgattatatgacccccataataaacttttctttctttctttctcttctactgttacttttatgtgttgatttgtatttttcaattcaggtgaataatcatgctgagagaaaatctagtttaacagttgatttcaaagtgattcaaatgaacagtttattgatctttgatgactgataaaaacaaattattttggcataatgaaagacacagtactctataaaagcagtgacagcaaggtgcatttttaagttggcatttgttagaaagatgcatttttaagttgccatttgatacaaaggtgatagctgagagagaaaagtgtgaaatgggttggattggtgtggtccaaaacaaaactagatcagaaactattagtctattgcttctacatcattctcattatcaattgtcttcaactgcatggcctacggtgagcatccaaggccacagttccctttcatagtcccaagggaaataaaaaccacaacaaaacaaagcaaaacggaacagaataaaacaaaggaaggaggggagtcatgctgtctaatatgtcacctcacctcatgtatgcaatcttttgtccttttgtttggtgtccatttatgtgaaatgggccaccgaaaggcaaaactataaagaaagataagatatagtttccctgaattcacgaaaaaatataactgggatgaattcacaacaatggataaataaaagtaggagaacttttccaaaaaaaagataaaaagaatacttagcaaaacatatcatcatctctatttactaattggttacaacattttgacacatcattatttgttcacacaataaatacttttttcttagaccacatatatccttttttagaaacaaggctgataaaggtagataaaattattatgagcagcaaagtcttttctgaatatttaatgtaattatgtacttatgactgaaactcaaaatcgctggttaagttagaataactctgtactagttaatccttgtgttacatcataaatacttttatgcatcgatgttgcttattttgatacaagaattgtttcaaacatgtacatttatggcagtgggaaatcaaattggagaaactggcttcagctatttgaggaaaactctctgaactcctttatgcagttcatttggaaggaactggttggcgtatacttaaagaaaccatcgaaagagaaaaaacaaaaagactattttacaataatggagtcctctaatgaataagactagttctgttaaagatgaaagtttcattaatgtgtttttgtctcttattcgataagattgttctcataagaaaattaacaggatatctacacaagatatagaattcaggatttggtagttcatatctgtccatgtaaaggctgtttaagcatcgttgtatcataaatacaacatgttcctattgcagaagattccagcacaaacaaccaccttgtcatttggtaagtaatagctattaaaggattagcagactataaaagattgcagagatctgcaacaaactacaggtaaaagaggatggtgaatattaacatgcatgttcagatggaatttagaaatgaagttgaacagaccgtttgctaaaagttgcaattcttcatcatattgaattaatgcttgcatgctaaatgatgaaaatactgcttggaaaatgcagcgttttatgaagttttgatgtagaagaaacgcacacaatagttagtttctatttattaaaagaaattggaatattggtacataaacatgacttgcacgtatacaactcttcattatacatctttattactcaatacatgttcagcctgtctcatttttaaattgtcttcatatagcattatccttattttataatcattgatattttcgtaggaagggactagtttgatgttaagtagcttctgatgaatcagaattaacaccaacattgattaatgaacactttcaaaacatgttatattccaacataacaaaattcagtaaaaacatccaaaacaagtaatatttcaacataacaaaattcagtaaaacccaatcatgagccaggcccttgatcgtgtggggacaaagactataggagtacatgtcaaatacttacatcctaaaacttctgtcatactcagaagacccaagcaaaagaaactaatgtctcttccattttttgttttctttatcttttttgtgatgtcaccttaaattggcactcccaattctgttcaaacagctgcttgtggttgttgcataggccttgctcctaaaatcagaatccctatctgaactaggccctgcttcccaaagaccctgaagagaccttcttgtggaatgaccatatctctcaaattccattctttgccttggagcactatgtgacctaaccttggctctagaagattcggtattcgccatgtaattgggatgacccgggtagccactgaagaaactccatgcacactcactcttagttggtgtgaatggacctctccttgcatcacttccaagtctagaggaggcagaaaatgcttgaggactatcctcaacattttgcaaagccgcttcttcttttcctttgtgagatttcaaagagccaaagggaagaacctccctagaagatagacttggatttagagctttggaagaacgtttggatggagactcataggccacaaaattctcattgttgtaatcagaagacaaataatgatgtgatgatgtctgaaatgagctgccactactatggtgtgagttcaagtgtggcttccaagtatctacttcaagaatcttgtcactcttctcatcatcaaggtgtccatttttcaatgatgcatctctagtttgtctccaagaattttcttccatccaactgtctaaccaatgggaaccgaaccgagctttctccacgtcaatgtccctaaaatttgcattggaactacatctctgcaagttgaaaatggagaatgcaattaaaggggaaattaaattcatatccaagtgatcccttgaaaatggagaatgcttggagtaatattatgaagaagaaccatgtgtaccttgagaatagatccatcaaattttgtactataggcacgaagtgagtgctgataatcttcagggacctacaattattcaaaagaaagaagaacaaaaaaaggttcaaagaaaggattaatggttattatgagctatttgattagtcacatatgaatgattatcattatcacaatggcacgatccaacctaaagattatctatagaagcatgctctagcaccggtttaatttgcaacacgctgttttatacagggtggaaagttattctgtaacagattcctaattgcaaacatttggtggggtgatagaaagaaagaaaaaagtagaaaaagaaaagtacattaataaagataacacgtttgaagaaagtgaaatgccatgccaatgccatcacatagcctttgtaacaagttaactacagcttaattagataaggatcatgtcatggcaataattaaaagaacaaaaaagatatacatatatgtccactttgcttacagggtaatgagaaagtgaagacttgaaagaatgcatattatctgacaagttcccacgagttgcacgtgcccgggactgcagtctcaccaaggtttgcatgcgccttagcatatctgaagtttgcttcctcacaatgtgacccctcaccaatgcttgcaacttcaccaatgctttaagtgctctcaatgccctccttgccttccaaattcacataaaaaaatataagtaaatcataaaattctattccatatcgtactgttcataaaacatatccatgaaattgaactatcacattttttcaggagaaaaagagaatagttaaagaagacaaacaaaaataatgcaaagggtaactgcattgttatataattgtaaaagaatttagttagaacaaattaacatgtaaagtttttacaaagtcatttaatcatacattgttatctatggtaagattcttcactttaggaaatattactttaaaatgctacatccagaataaaataaagatactctcaagataatattaaaataaaatatgggaaatagataagcataggatgtcagaaaggtggagaacattaaaacgaaaaagacatgagaaagaaggggaggggggttgaggttgatgggcgtaatcattagtaaacataaatacacagtgtaaagccatccattattgatgctccttcatattcattgaagcttcctatgttgcatgccccacaatggttggaagacaaaaggtgaaaaatttaagttgaacgaataatgtaatcttcatgttactttcagtttcttttagaaagaaaacaaaaaacattacacctagctgctggtccgtgttgtcctcaacaagagtagtttcctctcacgtgaaggttaaaagtaaggtgtaaaaaatctcttttcactttaaccccccaaaaaaacatggctttttcactttcggcttttcatttgtcaagcccaagaatccatcaatgtaccatttttcttttttaatcaacaaaagcggtagaatgcatacacacttccaatactaggtccaaacagcaaattaaacaattctacctaattaagggattacttggacaatgctctaaacatgaaagtatgacaccccctaatcccatactcaaaacactacttgacaaagtactaatgacatgttggaaccttcagaagaaaatcaaatagacacaaacatttcagtgcaaaccttaaccacaaccagctctaccggttaagagattttcttagacaaaattgtccatcataaaaaaacaaagaagatattaaggaaatccgaactcacttataaaagtgtgagaattcattctgaatcattaacaacttacgtgaatcaagaatgagtcaatgaatgtaccccataccataccaagccaaaaaacaaaactagtatttttaccaacttgcgcgtgactctcttattacttacattaagtaaaatataggtagcctaacaacaagcacgggcacttaggtccatgacctaagaaacatagctgatcatgtgttggtgcagggccacttcacctttggtgtcatttttgggtacatttggggacattctactttggccaccggaaaggtaagtatcataactcaccaatatgtggggctcacactaagatgctaactcccacaaattacccattttccaattctcgaaactttctttgttgtccattgactcttgtctagtcacactgctacattttctcaaggatccaaatcacacataagcaatacggcacagtccaagtacacgacaaaaggcagaacagaacacaccccacaacacaaaagtgactcaacacatgaaaattgcagccacctcgtgatgggaatacacgtggcagtcaacacccataacattgaaaataaatataaaatataaattatcttttcaggctacaagattcggaaatcatacatcagcatccaaatttaaaaatcaaatttctcgtcttagaatacgaaaaggtcaattaatttaatttcttacggaaattaatttatttttttcccaaagaattaaataaattatcgatattttttgtctttcaaaccaaaaaatagtttttaagattaaaacgatagatatagacaagttacgattttttatattcccatcctatcttgctaacgttacaagttggattctgtagagatttgtcggcggaacccaaaattgccgagtccacacacaacatctaccaaagaccaaagttttaccacaagctaaaaacaaagaggagtgttatttattctcattatacttcttaaatctattaatctaaataaccttgttatttaaattttttatttaaaaagtaaaaaggtttgtgagaaaatattataagggaatttagaattattcaaaagaaactaatattaaaaatttaggatgtagccagcttcaagacactaataattaaaaaatttactaatagaatttattttgtgaaaaattatactgtactaatagaattctttaacatgatcctaacgatgcagattaactttttattggaagaagaaaaggcatgggtgttgtgacttgtggcaggaaacaggttgctttggataggtgaaaaatttaagaaaaaagaaacagcgttgaaaatgaagcaatgatatttgactagggtttgttttccgagaagaagaacagtgtgggggaaaatttcaatttcaacgagaaaaattaaagggcaaaaagcacgcacagaaaatcagatacagatagagagtcaacaaatttgaaattagctcacgcgctgagaacgtgggagaaattttaaaatgaagaaaaataagtttttactagggtcaaagtcaaataaaacgagaggtaattaagaaaaatagatgactatgagaaaaacatgtgttgaactttaaacttaaaagaactgaatcaacaagaccaagcaaagaagattttggatcaattacttcatacttcatcactcttaatcaaaacacagaatacttaatttaataataaaaaaatttctaattatttttccaataaaacgtcttaaacactcaaatttaatcattgaaaaactcaagcaaatattttcaacattaattcaactttttttttcatcaataaacatcaatttaatttgatctttcatcatttaaaaccttaagcaacgtaacatgacacttagaagtgtcaatttcacttccaaaacatatttaaaagaatacggttcaatttaaatgcctttaaaaagaacttaaattctcatcccatcaaaagattggtaacttttgctacaaatacttaaaaaatcatactcaaaataatttataattaaacgatgataaaaaaaaatcctttaaattagaaaacaataatttaaataaattacatagttacttaaacacaacatttgactgtgaacattaatcactccgaagaacaaaagcaaaacaagatttttcacgtaccaagtaacctcgaaacgccgactggattttcactgcggcggcggtggtttcatttgccacgcgccgggactgcggcgccgcggcgggcaggctggaggcacagccggtgctgctggtcagcctgacaacctcggcagcagcgtgtgcggcggcgagagcggcttcggcgacagcggcggtggcggcggcgacggcgatggcatgtttgttggcgtccaaagattcggggaaaggagaggaggaagtggaagggtcaaagttgctgttgttgttaagtgttgttggtaatgtgttgggtttgtacctcgtactgtgtttgacgaagctccatgttttcttgtctttgctgggtttggaggcgtcggaggagggtggtgggttgtggtgcttcttgccgccgaagagtcgccggagaaaacccatgagggagaattcaattcaaggcattggtggagagagagagaatagaagataagagaaggagtggaatgggatgaagagtgaagaagagaatgaagggaagagagcacttaaaaggacgaagtttggaaggttgcacatttggaaatatgttcaagtgttcgttgccacgcgactctagccaccacgcgctctttcaattgctatactaataatgaatatttttggaataaaaaatctagatgtagttatttgtgtttttttttactggaatagtagttatttgtgttttattattactttttgctcctctttttttaattacaatttggagttttattgtgcgaactaccaagatgaatttttaatttgattaacgaaaagtacttattaatagaaaaattgattgaagaacatcctaaaattaaagaatctaaagaaattacaaaatgttctttttgttaaaaaaaatttatgctgtttgcacttttgaggttcttgagtttttaaaataaagtaatttttggcggctaagaaatcattttatccagaaaagaaattcacaagaagcaattttcgagctgtttttaaccacataaaagtaaatctttaaaaaaataaaataaacctcacatcattatttaatagaaatatttgaccaaaaactaaaatcattaacgagtataaaaaagtttgggattatcaccgtcaaaatttaatttagaaactaaaaggaaaacttaaaaaactttagagacaaaaaatataatcaatccttttatccttatttatacatgagaaaagtaaagtcttgttacttagacgttatattttctatttttttatttttcttaaaccaaacattctaaaaatttactatatttcttaattatttgtttcattcaccttatttttctttttttctactttcatacacacattttttcatctctcaccaaacaaacctttaaagtttttattggaacgaggaaaagaaggtagggaaggagaaaaaagttttaaattttcattaaaaaaaagttgaaagaatggaaattttaagttttcacttctagaagtaaattttcctttttcttttcttctcacttttttccaacaaaaaaagtattcatatttttttctctctattttttgtccatctaaccaaaattaccattaatatttatcttaaacttacctaaacaaacttaggccatttgcaacatgagattcctatctttgttttcttattaacaaccttccaaacaagattttttcattgaaacaaatctttgttgagttcttatttagcaccgatgctttttttttatacacaaaatgcaccttttctttattaatagtagtaataatcgtattaatattattaataattaaagtttctaatcattaacttgataaaatataaagatgtggagttattggtaagactcatttagtaacaaattcatatgtgttgggttagagagattggatgtttataagatgcttaaggtggaaatgataaaaataagtgatatgtacaagttaaaacacttaagaatcttaataagagctttaaaaaaataatcctaatgagttgaaaatgctattagatagggtttgtggatttacggtaaaatagtatgctatggaaaaggagtaaaatattattaaagtgtatctcatttcactcgttcggagtttatttcaaacctcaaagtgaacatagacgtatagggtctcaattagattgtttaaataacagaagagactcctttataatgtatttcttgatcagaaccatcaatataataaagagttaagatgattgcacattaccctctagagtgcaagtgcactttagaggaactttctccttgtatagccctaaaaatattaagaaggaggaaaaaacaataaaacattctttttaaggtatttctctttttcagataagcgctgaaatatacgaattggtatggatattaacttttcataccaactctcgtttttggtcgaaaataagtgattacttaatgaaaaagtagatactttaggtgagtatgaccagaaacatgtacatgatttggtacaaagtctcaattataattcaactaaactatgcgcccatttcagactacgaaatgtaaagttacagagcaacaattttgcttaaaagaaaaaagacaatacaatacaaaaatcaaataaatcaccttaatatattacacctgctgcaagaggaatgagatcttaattaatatgttcggtacaacatttcttcttattttgggacaaagtacaatgttttatcttacctcactctctgctctaattaatgttcatctaccatgaagatgatagccgaaaagctgtagatactacacaatttaagtttccacatacactttttcaaatatgaagaatgttgaacctcacactgaattttttacacaataaattaaaataaggaaaccgtgtaaattatctgtcaaaaggaatttgaattaatagtccatgctaagtagtacgatactatatgaattgcttctttattttttatactggaaatatgaattgcttattttataaattagtgaaaccaccattaattgtaatcctccccagccttgttatgagcgagcttcgtttttttttccttaaaaaaaacttttaaagttcttatttagtagaaagaagcaaatagttttattgaacctattttgtcactggtgcgtctatattagtacaaatattggtattcaatggggaaagaacgtgaaaatattcatttgtaaagtgaggactttaatgacaaagtaaagacagagaattaaacctgtatgcttatgcaactgagaatttaacttggtgaatcattctacttgtcatggcataagtaggggctgttgggctggttgaaggattggacccacatatcttaaataacgaaaacaactagtgataaaggatatttgaaaaaatatgaaacatttaaagtgtgggtctatcgtacattggttcatcaaatacgtagcggtcccctaactccgcaagcaaatgttaaattaatgactgcaataggataaatatgtggaaacatgtttgggttgacaaaatattttccgttttttttcttttatcaatgggaaagcaaagaaaaggaaacatgaacaaactagggcttaatgaaagtagtgtccatagaatcagcaactaataaaaaatgtaaatcactagggtagttgggtaaaacagtgaaaccaacatccatattccatggtagatcccttgctggccaaccaatcagcacacgagttgccttcatgcaaggtatgttgcagcacgaccacctagtccttagccaaaagatcacgaattgcattaacgagaggagcatggtggtgagttgaggaagctatcaactcaatagcacactttgaatcagttacacaaatgatgtctttaaagcctgtttgccaagccagcttaagcccattgtagattgcatgaagatcagctgcaaggaaagtgttgttaatgatgtccctgacggcctgattcaagcgggtgctagagcatatattcagattccagttaccttcattgaagatatctttaagcaaagatatgggtgccatgcatgtaaatgtcaaaggctttgaagtctcgttctatacttggagacttgatccttttaactgcttccaacatactcggtagtaggattatcatttttgtttctttagctgagttatgttttgctgtaatcctttcctttcttgctgcggattggttgtcatttgtaacatgcattgcagctggggaaagggttctgtgtaacatgttttatttgggttatttttgtttttgtaaaaatttaacacaattgaaagttaggatatgaacttaaaatgggagtgatcatgagaataacattcctcattttattgcacaagttttcatctgggctcatgaaatgtagtcctttactaagtccaacattaagccttgatgacatagtaaacggtgcattctacttgacattggcccaatactcgttgcaggctcgtaacgttcacccgtacaaaaatccgatttacttacaagacaaatcattgatttacccttagtgtcgaattcactcaccaaagaaaaagttcactttaaaatattcatatgtttagaggggataatcagcacgaaagtatttggcacaaaaatgtgacaaatagaaaactgatatatcaccttactacatgggtggttaaaaaatgcattatgtttttttttaataaaatgaccggctatgaattcgtaaaattggtttggtactaaactaaaatatttgtctcatatatccgatgtaaaattcactttgtataactagtccaataataatttcaggttagatggtcaccttcatttccctgccttgtgaatgctcttgatgtgaaaaaggcaattcttttgtattcaattgtatttcttccttttttttatttttatttcattggttttaacactaatagttaatcaaaacctgtcatttggccattcaacaactattaatcaccaagaacataaaactaaattatagaatactcaatatgtttctaaaagccaaaaaaaactcacttctttatttcattgtattcatctccttttgccatgcatggtatagcatgtttctccaaggacatggaaaccagatgacattataactaaaatatagaagaaaacagagagatggggtttcagccttattctcctaccatccgcttcatatgctctaatttgcacctgtaaattaattttcaagagtaatcatattgaataagaataaaattaagaagaaaaacttggtagaatatgatcatgtttaaataaatttttctatacaagtacttgttgaaaaagaaaataagaaaataaaatgaaatgggtttcttccatgaattaattaattaaaatcaacttatcactctcacaaatattaatggtttcatcttacaaaagaaattcaattcattttacttctcattttcttttctcatgagtttttatggaaaagtttatcccaacactctctaatgttaaagaagaacgtgagaagcataccacagctaagggatggaatttgacactgagaagcgagttgagaagcaatcctaatggtgttgcaaaggcagtcacggtccacagcttgaagggcattgcagcatgtagcattagggtttgtgttgacaccaggcaccacaaatggtgcacaaacattgaggtcactcagctggcttgagcaggtgctgctctgtgtcatggccatttgtgtctcatgtgacacaaccaagagaagaattaaagagaggagagactttgttgctgcagccatgacttcaatttaaataacttttggttattaattaatttgtttactaatcccactgtatatgattgtgtatgcatggtttgcattgagtagtgtccctatttatggtgaattttggaagcaaattggcttgttcatttcgtgagtcacctgccttgagaggttttctgatcataactttggtgttggatccatggcaactgcatgtgacatgaggatgatcatgtgttcaatcctttttcttgtcttccttggcttatctccactttctatcaagtccgatatatagttctagtatagtttaattaggttaatgtgtgcacatatttgctaacacttagggtatatgtggcagaataaaaacataggcatggatagacatggataaaatttatgcaatggaaataaattatatgtttttttttttacaaataactagagagaaaggaagagaatagagaaaaataataatataacatatgatatatgtaataaataaattaagtgttatgaaaaatattaaaaaaattgaatggaaaaaaatttcaagtgttaaacaatatatacctaccactggattaaccattacttattaaaatatggaattgaatttatttggaaaaaaacctggacattttttaaagctgtttttatttaaaagctaaaaaaattatgttgtttgataaaaatagtttcgaaaactgtttttaaaactactatctctttttttagttttttcaaaaccaaaaaactataacatctctatgatcgatgtttgggttttttacttttaattttctattattcatgttcttccttgtattttcacatcttacttttccacttttactctctaaacatcagtttatgaaaaatgtttcataaaatagtttttaaaaaatagactaagaaattaaaacacaattaaacacactcttaaaaatacttaaaaattatttaacatgtaaaatattattttgagaatgatttataaatactcattatgcttaatattgattaaaacactgagtaaaataaaaacttgaaaaaatagttttttttggttgttgaataattagttagagaggaagaaaattctaatttgaattgatataaatgaccataaaatatgtttcaaaaataaaaaaaagacacatgactgcataaaaatgaaatacctaaaataaaaattttatttcaagaataaaaacttgaatttgtactgtatgaatatattataacgttaaaatcttaaccatttatttattaataattataacttttattcagtaaaatgcagttctaacttaaagtcaagttaattttatataaattactttcctaatttggagaaatgattgatgcatatatcctttgaaatcacatatccccacttttgggttaggctgcataattgaagtggggcttgcaaaatatgagttacaggcaaccataattactgtgttgaaatttcagttggaaaagttcaaaactatagtttaaataaaatcattagatagatttttacgtaaatcataatattacaaaaaaaaataacatcatatatcaataatttggcaatttggggattgatttgtaataatttaataaataatactagcaaaactttctaatatccgtacagagttacagtaatcaatccagaacagttattaagatatacatctatttaaaggttcaaaataggcttttgttgggtactcaattttctagtcttgcatgccttatacgccgccgagttggaaaatgatgaatgttatatcttttgagatcatatatccccacattttgggttgggtggcataattgaagtggggcatgcaaaatatgagttatttaggaccaattacatttggtgtttcaattctaattaaaaaattaaattaagattttaataaaagttaaaacatataaattttaacttaaatcataataatacaaaaaaaaaatcatatttcaataatttatttgatatccgattatcctccattattacaagatatgtttaataaaaatcaaattatgtaaatattaccagtctatagtgatttcataatacgtcctactaacaaatgattttattaatgtaaagattaatatataaatcaatatataaaatattggtataattaatactgatttattaatgcaaaggtactgcaactatattaataatttaattttcgttaaattaaagattatattaacagcaataattttattttaacttttgacatttttgttcagttaataaatatctttagtgtcttttgatacttttcagcaaaaataaaaattgaacactaaattagacactaaaagatctataaacgtaaaatgaagcacatataaaggatatatataatttttatctccacctaaggatatataataacattatgattatccaatcttcgtttgggttttcattttccagtgccataatatatagctatatatcaggcaatcgactccatttaagctactgttcaaatcatgacaacatcgccaataaaaaacatgagatcagttaactcttaatttgttgaggaaaatatggcaggtaaactctggaatccagagttttgcacagttaacactgaattagcaatcaacaaaatgtgcttgcacaagccccaaaagaaaaaataaataaaagtaaaaaaacaaaaagaataacaataaacaactaaagaaataaaaaaagaaaattagagtagcaaaagagaaaacctaaaacacaagggcctctaaaaaactaaaaaagtgtatttaactattcttgtcggaagcggctggagctgtccaataattcttcacagcaaataaaagtttctccctttcaagaggcccatcttcatggtccacaatttgactgtcccaatccatgccattgactatactttttacctttaccaatatatcaacatcatctctgatgatcacacttccttcaggtctaagaatcctatccatctctaacaaaatgtcttccaattcacatctacaaagaaaatgtagattacaattaatgctatgcacttctaagatcattggtaagaataaattatatacactttcaagttatagaataaaattcagttgctaacaatcaccatagcatatagaaaagtctatttttgtttatatctaatgcatgtgaaacttttgagaataatccccctattttatagtctatgagattgtaagcattttattactttaattcatcactttacaacaacccccactttaatctttacaaatcatcattcaattttgtccttttcattacattttccactaacattaagcaccaaagtaaatggtgtttaggaaaaattaggactaaggtaaaccttgcacaaactttgagtttgatttaatagctaaattttcaatctttgttgtaattttcagtcaaacattatcttagaaactaaaagacgtcacacaaaataaatgtatactagtacctgtcattgtagaggctgaacagtgaatcagcatgaattaagtcataagttctaggataagtagacattgcttcacacctgaaacataattgtggccacaagcatttcagaacttagaagaaaaagaaaagggagagaacttcatcaaataaagactacaagagaatactgaatgaactaaccaattatggtatgttccaatcaaccccctttcataaattgcaccaagtgtgtcaaccttagcctggacaggaaccacattcatcacccaaacaggtaaatctacaagtgcagcagcaaatccacccaagtaagcattcatgtctaaaaggttgcggtatctcccagcttttcctagttgattattagccttcttataatatgctacccttttcttccacagttcattatcttttgagaaagtttcgggattcacaccctttatggtcccccgagaaatccttggtggggtggcttttagtctttcaggccattttttcaatgccccgcctgcagtttcttctttgctggacacttcaggcataggactcaaacatgtttgcatatctgtgtacctgaaatgtgaaaaaaaattaacaagttaaataactcaccaagtttcattagtttcatttgagttttaaaataagagtttaagaagtatatgattgttataatcacttataagatagtcatcataaaagttaataaatttatcatgataatttataattggatcacaatctttataattagatgttatactctttacactaataatatatagactatttactctttaagtatgttcagatggtttaaaaaatctttatttaaatttttttatttaatatatgacttttgacatgtcaaattataataagatgacagcataaaaagtaaaagctctttacagtgcatgcactgttttctcaaacttatttacaagttaatttaaccaaagatataaaacagatggaaaatatttccttgaaagaaatcaacacaaggataatggaaaaatgaagcacataccaggccttgtcagggttattttgtgccttgcagaaaggtctgttttgagtgagcttacgattggatttgcaatccaaatggtttttggctttctgccaaatggctatatcatccttctccactagcttgttccagcacaggcttttagctgcattctcaattttggtctgctctttattcaaatcctcctttgttctttcccatcctttccaatgtttcttccaccggattggtggcccagatagaatccaatacccaccagggcgtagaattcgatcaatttcattcagataaagcccatctaattcatcaagtgggaaaaaattaaaccaacactagttaatgtggttgaatcatgaaacttcattctttttagcttcaacgattgagtaaatttcattgacactcccgagattttgtcaaattatctcctgtacttctccttaattattattttatccttacgctgtttttgcttaattgttgaaatacataaccttaacatcctcaaaaacattataacattatagtgcataccctattatacaagaaatgtacctctaaaaaaaagtagcgtcaaaaaggtaaaaaatcatgtgcattctcaaaatacttaagcaattgtcaatataatttattcttaatatgtttagtccctccaatgattctagttctttaaattaaaaaaaaaattgtctttctacatttaattttttaaaaataatctatattatcatttagtaataacgtgatatgcatgtaaacgtgttatataaacaagatgatatgtgaagtaacatgtctacatacatgcatgtcccaatatcataagactatttttaaaatttataaaaattaaaaccaaccaaaaagaatttaaagaatcaaaaccaaaattcaccatattacaaatactaaaacaactattaaacatttattattattattcttttgataagaggccaacaaacaataaatagttgtaatttggtataagtgagaatagtaataccatattcagcccaaggaatgaggcatcgagagcagtgtgccatgtcaaaagctctagaagggaaaggcaacctctttgatgctaggaccccaattaatgcaggaactcctctttcaagagcaaactgaacttgtgcttcgtgggtgtcccttggtgcaattgacactgttatgatgtcacgtgacagaagataggctccccaactagcaacctgcaccaccaaagttttagataatactattaaaatttgccctattacacagttcgatcaccaataaaattcagtttcgtagatttgttcttggcatatgaataattacaaaattagattcttttatataaaatataacttgaagattttgagtcactagctaagacttgtttagtttttgccatacatatatagcaaggttgcagagtatgaaccaaatctaaaaaataatcttctcaagatgtgatcgggacatcacatataatttaacatgcgaacaacaacaacaacaacgccttatcccactaggtaggatcggctacatggatcaacttccgtcataatgttctatcaagtaccaaatcattaatttcgagatcctttttgataacctcttttatagtctttttgggtcttcctctgcctcgaattatttgtcttctctccatctggtctactctcctcactacagagtctaccggtcttctctctacatgcccaaaccacctaagtctattttccaccatcttctctacaataggcgctactccaacttcgtaccccattgcccagaggttcttcgttatgcgaaggtatgggggagagatgttgtacgcagccttactcttgcatatgcaaagagactgtttccagattcgaacccatgaccaacaagtcaccaaggcacaactttaccgctgcaccaggactcatcctcaaggaaaaaaaaaagaaaagaaaaacaaaatttctagatggaataattaatccatattgcatagtcatgatatggtcgaatgggtcgcgtcgctcatttctaggtgccgctcaaatgcaaagacaaaatacagtataagaaagaaaccttccattctcttgtccattttcatattgctttttaatcaatggcgcaaattaagcacaagaaacaaaggccacagatatatgactcaatatgcaactatataatgacttacttttatcatatgttaaaaaattaatttttacttgtaataataaattggtatgtcaatttttttcccacgtcattttatgagttgtgaattataaattctaaaatttaaactattaatgagtcaagggtgtttagtggtggaacaaaatgtcagagttattataaattttttggcactcttatattcccacaaataaaaaatattattaaatgaacatatataactcattttattacattagaatcctacatttatgtgctcagcttcaagatcatatctaagttgaaggtcctctgatttaggtcatgatgagtaaaatttctactccctgataaaatatttaatttaatacagaaaatattaactccatgctgataacattaatcgtttttgtaaaggccaggcagccagatacacttgctttggattcattcatttcaaaacgaaataaaagacgaaaatttgatacgaaagaaacgaacaaattacacacacatcgttacaaaaattatccaaaaaaacatcctcagacaaagacaaactcaaactctatctcaatttcaaatttggaatctaatgcgtttctacgagtccctttcctcagttattacagttaaaacagtgagtctcctacttacccattttctgaagttaccacaaacataaaagaacatcaataatagttcacacccgtgaattaaagacacgacctcataagttgttgtaagagtaaagggccatttctttttatggtgcattgtagtacagaccctttaatctgaactatttccttcaagaactcaatgtttgttttctagtaatagtagttaagagaaactaaaaataccgctaacacaataaatgccatttttttgtacccaaaaaataaatgtcatttttcacaaacaattgaaaaaatataatcaatttattaaattattagtttctaaacactgatcaatttaattttcaaaattacaaaaatattattctcatctctccaatagctaaatgtcagtatattgtttttctgttttttatttcagacattgaaataataatcgtgtagtaatgtcaaaagaccaaagcaaccgttatttcacctatttgattatttcaggcataaattgaattataaaaaaaagaataatataatttgtatttctcaaatagatatacatcagaatttttgttctcacttttattaatgatttcagatactaaaataataatcgtttagtaacgtcaaacgactaaaataactatataaattaacacgtaatcataatttaattaaaagtttattaatgttttttagactatcatcaaattatatgtgacaaatttattaattttataataattaacttatagtgtattgttataatatcaccgaaacggtggaaacagcatgattcttgtaccaaaagtaaaaacaccaacaaggacaaagaggttcagaagacctctttaattagtttttcaaataaaaaacgttttgtaatgtaaccataaaaaacgttttgtaatgtaaccataaaaaacgcaaaataataaaaaagaaggaagaaaaggcgcacgtaccccacagccagtgtccacggcggttctgaccgtgccgtcacggaggttgacgaggtcggcaatgtcgtcgatgtacttatcggctccgtcggggaacatggtgccgcctccggggaagtggaacctgtcgccgtcgtagcggatccagttctggacggccttctccaccgtgagctcgcggtggggcacgttggcgtaccacgccacgtcgcggctcgccggccaggggaaggggttccggtagccgtgcggcgcggggacacggcatttcagaacctcgttgttcctcggacagtgtcgctcgcggtagaccattcttctgcgcgagtattggagggagcgcgcgtggtcctcgcagggggtgtactcgctgagcgacacgtggcaaggagggaaatggagggtggtcgaagttgaaggattgaggtttgtggagttgtgatgagatgaaaagtctaataagtgagtagtggttgttaaggttgggttttgagggcatggtgttgttgttgttgttgttattgttgttttggtggtggttccttggtatgcaccgaggaggtaggagacgatgcagagaaaagccaggagggtgtaaagattggtttttttgaagaaggtggtggtgggtttggagggtttggctgtggggtggtaaggcgaagtggaatcggcgttgagcatggtggtggtggtggtggtggtggtggtggtgtgtgtgtgttattgttgggtgtaagagtgtgttatgttatgtgtagtgatgattggaagacatgagggggtttaagtattggaaattaggaagtggaagggttactgagtgtgtgttgaatgatggaatgcttatgctcgtgtgagggttcagaagtggggcctggtttcgagaaaagtgaaagggtgtgtctcgccaatgcttgggtgtgtttctgttgctggaggggaagggttgagatgattattttttacagctgataactatgtagcacaaattggatttatgtccttttggaataagatctgtttcttattcttactaactagatcaagtatataatcaataataatgtatttgactagggatgcatgatgacaattactacactactggagttttttttttttttttttttatatataggttgaagttgaaggcaaatataaaagaatgtaggataattcatgtattatacttaattaattaagttagacttgtttgctaattattagtactttttttatgaggaagtattattactagtatactgtactactatggtatctcaacattatttcaaaaataataaaatattactccttattttgttatattatatccttattttaatttattttgtaaaaaataatttatgcatcgaagaatttgaagaaattttatcatattaactttttttaaaaattattcatcaaaaattttataggcgctagtaactttttttaaaaactttttatcaaaaattttatatctcaacattattcatcgaagaatttgtgaacacatatatggctctctcacaattacataattttcagatattataggcactagtaaattatatcattagatgctaattagttggctatataattctggctacttaaactgcaactcgatttacatttcttcctctaccacttaccatggatcatatagcttaaatttggatatattaactcattcttcatattcatcagtatttgtcttgaataatgaatttttatatactaccacattaatttaaaataatttatgatctacttgaaataaaaaacaacttcagatttcaaagatccgttgctctaattaataaccatttaagaaccgtacgttgatcttaatcaacagtaaccattgttgtcaaaatgattcagatttcagaactctcgtatctttgaatggaaatgtattcgccaatatttaagttttacataaccatactatgcgaaaattttgtatcgacctgtttcttagtaaatgtatatgactatccaatatatacggctacttaaataagttattgtcatgggtcttataacctacacataaatttaattactttatacaaaaatttacttaatattaaaattactaaaataaaggtttaacttaattttatgagtcttacaatttattaattttccaatttcataacatgaaaatgcattttttattcttatcaaatttttaagcaaccgaccctggtataagcaatgctacgttatatgcttcaatgataaattttgacaagcaacattgtttaactaggccaaatgatattttaattctttaacatatctttttattcactttaattttttattttttaaaaattaattttgattttttatatatttcaaccgttttaatttggtctctatgattgttgtgtggttacttatgttaatatgcttaacaatattctatctctctccctcaaaagatgtgtaaaccatcaccaaaatccaattcacaaaaggaggaatccaccaccaacaccattgatgcatgtcacccctctcgtgcctacaccatttgcgccactgcatgcctctacacaacgcaaatatggtggccccacttaaggttgtgaagaaggagctcgtcgtgaggagtttgccagtgccatgaatgctcttgtcgatgaaatttgtgtttctctgttggtggagttaaccatctctgtcagcgcaaatgacgcactacaagctttgggtttgcaagagattggagtttgtgattttcaatttaagaaaaagaaaaaagatgaggatttgtgaaggatgaaattggttttgaaaatgtgaaatctgaattttagtttgattatgaaagtattataagtcacaatatcaatcaaggctagggtctcattgtaaaagttaggaattgaaaaccaacatcatgagattgggattaaacatccaggattggagaaggaacatacatgattgaattagaaaaatatgtttgtactaattttctagcaactataaaccgctgaaaaatggtttgtgtttattaaaagctaaaggttattattgacggttttaagccgccaacaatcgttaagttaaactttttttacattaaaattgaggtctgtaatagaaataaatggaaagaatcaattcattttaaagacataaaaaattaaaacaatctttttaaaagatatatatatggccaaattaaataaaaaatgagataaatgatgataaaaaatgtcatatataacccttaacttaaaacaactctcgtaagcaatggcacatgccatggcctaaatgttaatatggtcctgtctatttaatttctataaagagagatatatagatacacaattttcacatgatgtaatgaattcaagagataacatgtttttttttatctttatactttcaattaaaccgtagtaaaagtccttatatattcgtatcgatgaatttgattttgactttttaaaattaagtaaattttgttaacaatgataatatagagaagaaaaagacgggtgcaaaagggagatgaaaaagttaaactctatcccaataatgcaaaactgaatgtacaaggagaaaagagagaaatataaagtgaaaaacaataagactaaattacctttaagaataagttttaataaaatacacattgtttaacaaatttaataatttttctctaagaattcatcatttttttaaaagttagcagagactaagtttatttgttattttattttaagatttagagaccaaattcattaatattaaaatcgccaaagtaaggcttttaccacgcttagcttttaccaacttcaacatgaaagaatgcattttcattaccttcaatatcgcaattctttcttcctcaaatgaggaacatagtcaattattcaatacagtaccactatttggttccagaaagtctaaacgaagactaacgaattaatcatacgaacaattaggtgcttggtaaccgtacggtagggtctgagtgcattattctttttcactaataattcaaacttctgtttgtacaatttcgtgaacaatattttcgtgacatttaacttttttcttatttggtatatgattttcctttcatttttattcttaagttatagttagatcaaacttcccaaaacttcatatcatggctccttcctttttcataatagatggaaattagagaaacatgaactcatttccaatgaatgtgttttttgtttggtgcattttgaattgaagaacacaaaatagttgcaatagcaatataatttttaaaaaacattaactatgccaaccaatacatttcacgagacatcttgcgtgtgatcatggtttaattactcttggatccaaatcacttatcttcctttttcttttcgttttagctcctctaataaaaatattctactgatagattataatgatttaggtaaatatatatcctatatattaagaggctaacctatcaaagagtgacaaataatgttgtgtatttatttattatgaggatttaatttttggaatttggtcatgtgatttgggtttaagcctaacagattggatgaaatgcgttggttaagtgaatcaaaggacagtttatgtcctccctaccatgtgcataccaaagatgaaaattaggtacatgttcatcattgggctaagatgagaaatatataattgaggtggtagaatctaaattctgaaatctttgtgggggggggttaattctagtgtccttatatcagctataaagactacaaaatttaagtcagttgtcagcatatataaaaaaataatataaaaggtgatgaattagaattagagagtgtatacactatgatcttgttagacttatttatacgtggtgatgtgtgagaattgactattcataattgagtatctctatgtaagtgtttattttgccaagagggtgagaaatgtgcttttatcctgtccttatattattttttgtttaataaatcaggaaactttgataaaatatattagatataagttcaaatatgtgttatcatgagttaattaacaattatctgacggtagcaagactggaatgtgtatttaaccctgatcccaaattcagtcagccatattcttttttcttagttttttcaatttaaatcaagtactacaaatgaatcaattattcacgaatgtggacattttctctcacgtctaaccagagatacaacaggtcaagtaaagaatacaatgggggaatatatcgacctcaaactaagttaattaattaaatcataaataaagagccagcgaattagtttacaaactaataatatatatagcggccaataaatttaaattaataacacttagttgttctttgtttgacggtggtggcggtacttatttcacaacgtagcatttaatatatattatttttattattaagttttcgtttaaattgtctcgtaaactttaataacttcactaaattttcaaatatatatctaaggagttttgtgttcgagtcatatatatttaaagagtccataataggatgtcagttcaatgtttttttttaaaaaaaaaataagttcgtatttattaaataattttatttttaagtttttaattaatgttctatgttctaaaaatactcatttactaatattttctataagcttttccccacaagtctctgtttcattgatatttatgggcaccatcatgttgattgttgcctaggaagtatgaacagatatctcacatgcatccaacaagctgacagtgagagagtttggtatgggctgtgatttcgcacgcccatgatttatcttctcactttccatttttttttataaaaaacatctttttgacggaattttatttctattttattaattttgtgtaaaaaaataaaaaattgaataacaaaaatatctttttgttgtgataaatattttacaattttttttaactcaacaatattttttggtagcaagattaacaaaactcaaacaagtttgcattttgttaattttttaaaataatataatataaactagtttttgttgaatcagcaagaagccggaaaaaaaagaagcaaagatagaaagaaaaagaaaagaataagaattttagtattaaaaccaattaaatataagttttatgtgaaaaaaataaaagtagtataaaactgtaatttcaaattttaaaatttattttctgaattaaaacaacctgtttaatcttatttgtccaaattttaaattatttgagattaattatgaccattctattatttaattaaagattaggggtaaaatggtcatttcaagtaaaattttgtcaaaaagattagacagaaatcttctgtgattaatagcattattttagacctttcttaaaaataatgtaaggaaaattggttgtgaaaattttgaagtttaatagagtatagtaaaaattggtattttagaaattttaaattttaatttagtttataacttaaagcagtaaaccaaattattatattttgaatttagatatttttattaaaattatttaagacttacaagtataatttatattatctttttcataaaacttaataatatacgcattatctgcagaaacaaaaattagggaccataaagtagaaaatgttcaaataaaaatttcagtgactgcccaaattttttatatcttttaattttttttagtcctttaacttttttttatctttaattatagtcccttgactaaaaaaatatttagagactaaaagtaaaaattctaaaaggtttaggaattaaaaaaataataaatcctaattattaatataaactagaagcattctgctatttcatgacttttaacacaaccacgattctatttctagaatcattaacattaattaaaatagtacccaaaaaaatataaaaaaattatagtatgctcagtggaatcattaaatgaaatgaattctatggttttcttcaaaatttgacattatgatgtcgtggctcatctctctatctacttctgctttttcctccattagaaaagaagactttgtacaacacatgggttcgtaatgatctacgtgacttgtcacaaaagaaaaagcacgtagttacatatgttgaccatactgatagctataggggtaagaaagttagtgtcattaaagaatatgagacaaataaaataactaaacagtgagaaaagtgtaagaagaacaaagactgcatcattcgcctccatgcatcgttcgcgaccagcttatatcaattaagaaatcgattaaactattggagaaaaaataccaaatcagattatcacttaagaagcaatagaatggcctttataaggtacacaaaggaaaaaaaaagaagagtgccaaacacaaattgacatatatatgtaacattaatttaatagattgtggtctatcattcatggcctataatttttcaaagtagaacaccgccaatggattgggttttgtttggtgtctaatcttcactagaacacgcaacatgctttcaaccacaaagtttgaccttgatgcctttgtgggctcgcttgtatagaaatgactataagttgttggactccctttttttttttttacttgaaaaaaaaaattgatgagtgataataaggaaatgaatacttggatactcaacatgctagtttacatatagtgatagcatgataaaagaaaatgaaagatgagtattaattataggtaatatgatgtgataaaaagaaaagaacgataaagaaagttaatgagtattggataggtatttaaaaaaattagtttttcttcttcttaaatatttaactttttaatatctcaagatttttcctctgtatttgttaatatgattttgctaatcattgttcccaaagacattgattaaggaactcataagaattttattttttattatgaaaatcataagggagtctaaaagaaattatttgtgcattccaataaaaaccttatgcctttccgttttctttaaccaatatctcacaaagtattaattaacatttaactttttaatatcttaggggtgtttggtttcactgttttttgttttcattttcactgaaaatagaaaatgatgatgaaaatgcgtttggttggatttttgaaaatattttcagtgaaaatattttctcaaacgaaccaaaaactgaaagcaataaagtctcattttcagtgttttcatttgaaatcagaaacctcattttggataaaataaaaacgcgatgacaaggaatgtaattttaaacaaatataaaaatatattttcttttgaaaacgcagttttagtgtttttatttcttgaaagtagaaaacaagaaatcaaacaaaacatgttttcagaattataatattttgaaaatgaaaacagttttcaaaaaatgaaaatgcaaatcaaatacacccttaagttttcgaaatattattttagtcttttctatgataaaaaattgtttcaaaccatttaaactgccacaaattagtcaggagagatgaacaagaacattttgaagagactaaaaaaaaatcaatttggagactaaactcttacttgcttcaagttagactaacgtttatcatgttgactcaagtttaaaatttatttccaaacatcttcaaaataacaaaatcacgtttatgttggttgagttctacattccatgattctaaacgtggaaccaatacactatatctaattgaaaagttaaaaatatttttttctcataagactactattaacataaaaaatattactagaataatatacacgaatttgagatcaaagattgatggataaactagaataacatacacagactgatcgacacacttaataagatattactataataatatactctttatctagataagcaggacttaaaagtaagcattcaaagttttcacaacctacattatcaagacattttcttgtgtactcatattttcagccttatgtgccttataagttataattctgtccaagttcctcttatatgtcatcaggtttgagtttatataaaattgatttcagacaaaagtattttaaattaaagaattttatttaaattgatttatatttaaattttttattataaaagtaaatggatcaatagtaaaatttatgtttttaatcttttaaatttaaataatttattttttagtcattaaaaaatttgttttaattagttctacaaatttttaaaaagttagtcttagtccctttttattcattatgttcatgatttaataatttgcgttaaattttcactagttaatttatttaaaaaaaaactgatgattttaaaagaaaaaaataaaaacataaatgtgaaattgagacatttatttgtttattttttacacattcaaatggtttaaaattgtcaaaaatcatttttaaagaaattaaataaaaaaattaactataaaaaatcaccataaattataacaccattagtacaatagaaaagaattaaaaaagaaaaaaaattaaaagtaactttttgaaaattttgaagtaataataaaatcaaattttctgttaaagacttaacaggtgcctacaatgaggcagaactatagagaaacatcaggtttatcagttaacagattgtgaactacttgctggtaatccatttcattgataaccttatcaaaattcatcatgtctcttaactatttaattgctattaacaatcccaccttcgtgtaccttaatttggaaaaaacagtttccaactaatcaacacagatgagacaaagtgtcctttaattaccatccctcacacacatgtctgcttcaagaagatataaaattgacttggtggtaaaggataaaaagagagagagagggatagattgtaagttcaaattttcctgctaacaaaaaaactaacaaattaaaaaataatatttgttgataaaaaaaatgagaacttcaaaactcaattgctggttatcgagattgcattttagaacaccagttggtggtggcctgcacatgatgtgatggtccaaatgcattaattcaaccagttatgtagaacttctttggcatggtgtaccacttgactggcacagaagaaagatttaacctcccataatttagcattctgagtactctttcatggtgctccacagaagcatagccactattgcaaaaatactgctggtgatggctgatattctcttggagtttgaacacaaactcatgaaagccttctgtacacgccgttataggataaatagatggtctaatgccaaagatatttaaaattactttaatccaaaatcaaatttaaatttaaaatcaatccctcaatgattaacatgatatttactcaaaatcacgttaattaacatgatttttaatgatttaatgtgaatctaaacacgctgcctctaatgattaaggaatttgatttttacctgactatttatatttgaattttactcaacacacaaagaaaataatcattttaaatatacaaattatatatataatcaggtagaaccattcagacttttttcttatcatggtttaagataaaatacgaataaagacctttgtatcaatatcgaccatgtcttgttgcagttgatattaataatttgaacaaaatatgatcatacttcttaaaacttttgagaactctaatcaggtagaaccattcagacttttttcttatcatggtttagtagcccactgtcaaagtagaaatgaatgaaccaataatacatttaatctaaagtaagagcattattaaaaataagagagtcttaaggaaacataaacactggaaattgaacaatggagagatgaaatttctgtcaaagaagaatgaaatttacagctttatcacctgtcaagtagatttctttatagcacaaaacattttcctttcctcggggaatcaagatcactgtcttgttcagcttcatctgcttggtttatttctgatgtctaaaaaaagaatattgtgtcagaatatgaaagaatgcgaaacgttagggaaaaggaacaaaaagttaattagtcacacaatttacagaaagaaattgagacaaaataagcttgtgagtgtgcttaattcgaaacatatttgagacatatctaaccggccaatctagtttttaggcaacttataacactcatccacatattttaatacctattgttctttttcattgttttgctacagctgaaagaccttagcagaatcattgcgactttcctccttgaattagttaatgacccaataattatcaggaaaataattgaagtatataaaactaccaacaccaacgtctacaatgcaccctcaatttactgtgattatatccacttcttatgataaacatgttacttcatcagtttcattgtcttcacctacccctgcaaggaactaacgtctcacctacattgccggcagcaacacttgacaagcatgcaattgcaacaccaactgttcctttgactttcgtcttatctactcaagcagtaataggctaatagctccctcagttataaagcctacatctccacttccatcaatacctagttacctacatctccacaacaaaggataatgcgagcaacaccattggaatgccaaaggacaagttttttgcaaaaagttgtgttatgtatctggttcagtgccttcccaaccaaggtgcagttaaagatgtcaactattataagaaccttattagaacacatagaaaacatgcttctgagaaccatgtgctctaataaggttcttataatcgttaacattttaacgacagctgattggaaagacagtactaaactaaacgcagaatgcatctttttgcaaaaacatgtcctttggcattccgatggtgctattcggattatccttgttatggagatgttggtaactaggtattgatggaggtggagttgcaactgagtgagttgttgctatttgagtagatactggccaagtcaaaggagcaattgcagttgcaggcttatgaagtgcaggtgtcggcaatgaaagtatgacgttgattgcctttgagggttaggtgaagaaaatggaactaatggtgaagtagttgattgatcataagaagtgggtctactcggttcttgagggtgcactgttgacattgatggtggtagttctatgtactccaattattttcctaataattgttgggaaattaactatttcatggagaaaatacgctttgcttctcataaggttgttcacctttagcaaagcaaaggaaaaagtattaaaatacatggataagtgttagttgtttcgaaactagattggtcatatgtctcaaataggtttctaattaagcactcacaagctttttttggtcttaatttccatccgtaaaagctgtgtgagatttaactttttgcctaatgtttcaccttctttcaaactctgacataatattccttttaagcctaacaactagggatgggaaatggacggctgctgggtttggttagtttgggccttaaacctcagatctggttaatcccaccaacaatgaatacaaaatttgaatgtctcatctttatgcatgtttaaggactaaattgcttaaatatatataaagagaaaaaaaaataaacctcagatctaattaatcccaccaacaatgaaaacaaaatttcaatgcctcatctttctaaaatcattttatgcatatagttaagctttcaattgttgattgccatctcaaaaatataaaaatttacaagtgaaaagctgcttaattgacaatttgaacaatgatggattcttctggagatatatctaataataataacaagatttaagcaagtttgcacaaataaataatcatatatatatcgagagagagagaacgccaaaggaaaaagttgtaatagtagataaaggaaaaaaaattgatctcataagaaacaattagattatcagatactaacgattgaggaagaaaagttaaacctttaatatccatctttagaacctcttcgatcatcaagcctaagttggtgttcgtcttgatctcattgagtgagaaatttggtttacagattcaaaaaaaggtgagtcgtgttaagagatttaacatgatgagacgagagaagaggtgaaagggacaagagagatgagaacggcgctagggtttcagagcgagaaagaaaatttgaggattaagttttaggattagatgttaatacttatttaaagtacgtgacatgatatggacctgggcctaactttattctttgtttgttacaaggccctgttttcgataaatacaaagatccaaagtaaaacttccctaatgaaatccattcaaatctatttacctgcctaaacccaccaaacaacaatttttttaattgatttgtttgggtccaagttggatgttagttccttgcgggtccttatcaccaattatacattaggaatttttgcattaaaatcattctattgattacatgagtcattattatattaaactaaaatgacaagtgcactaaaggaaatagtagagtgccaaacacaaattaatatacggttagatgtactaaggattgttgtatatgacctataggtttaaaaagtagaacacctctaatggattaggttttaatgcctaatctccactagaacctcacataaatacatggttggcccaaggtaaagcattgaagcttaaactttaaatccatcacaaaaaaaacttgttctcagattccaattcaatgatgtcatccacatatacatcatttatatatacaatttaataaattagatctattaatctttatttaataaagatcattacatatatattaatctatttggattattgatgttttatttgatcacaataatttcacaatcaagaataatttagattaaaattataaaattcttatttctcattatcataatctttattatgataacaagactctaattttaatgaaacacttgttaaattaacaacttaataaaataataaatatgataataaaataaataacattttttacacatgcacataaaaataaaaatcaaaccttagatttgattgctccaccacaatgaaaacaaaaaaattgttgtcccaacttcctaaaatcactttatgcatgtttaaggactaaatttctgaaatatatataaagagaaaaaaaaatcacacataaatagttctattgattacataagtcattattatattaaactaaaatgacaaatactgtactaaaggaaatagtagagtaccaaacacaaattgatatatagttagatataataaggattgtggtatatggcctataggtttaaaaagtagaacatctctaatggtttaggttttaatgcttaatctccactagaacctcaggtagatacattactgacccaaggtaaagcattgaagcttaaactttaaatccaccaacaaaaaatacttgtttttaattaagtcatttcaatgatatcatctacatatacatcatctatatatacaatttaataaatgagatctattaatttttatcgaataaagatcattacatatatattgatctatatgaattattgatgttttattcataataattttacgatcaagaataatttaaattaaaattataaaattcttatttctcattatcataatctttattatgataacaagtctctaattttaatcaagtacttatcaaatcaacaatttaataaaataataaatatgataataaaataaataatattttttttactaacattgataatataataaattggatcttgtacatacttatttatttggaacataaacaacaactcaattcagcatgttgaagtggttgaccagattaggagtgcatctcagaagtggggatttttccaagggaacaatcatggcattcctgtggaggttttggatgagatgatcagtggaatccgaaggtttcatgagctaattgctgaagcaaggaagccctttttactcaagagatagcggtaagaaagtcaggtatttttctaatgggaagctgttcagagacatgactggtacttggagggacacaattgcatttgatgtgaatccagatcccccaaagccacaagatataccagcagtgtgtaggtaatgtttcttataaaagttctggggataaaacctgcacctgatcatgcttgatggtagttttgctatcgtcatttataattggaaaacatttagatgcaattcttttagtgaatatgggactgttttccattccaatcagaaatggaataagaaattctcataataaaggtttgcattaaaggtgtcataggttaccgagatgaaactattaaagactgacaccacaagagacgtaaggaaatgtctcttaaggtttaccctttactatatatctatctaggggcagaactctagtttctcggctgttatgtgatagagtacaacgaggtctttgaaataatccacttatttcacagtactaaattagagtcttcagattcttagaccccaacaacaagagcatgaaaggtgaaaatattagttttggtcattgaaaagtttcacttttttttttatcacttcctggattcttaaaacccaacactaagtccctgaaatatcagtataatatgttagtctatggattttgttgagtccgttttcgttagtggaaatggtaatgtgacaggttaagttgctgaggtggccattaggttattcttctttgaaggatatatgctaacttggaaagagtcccccccacctattaccatcttgaagcgtgttttctatcctaggtatttatttgaagaacttggtgttgagtcttaagaatccagggataaaggtgaagtaagtgaatttttcagagacacaaattctattccactctgtgatatatgcaaattgggtttccattatattcaacattgagcaaataaggaagctcaatgttgtaaataatccacgagattttcctacccaaaaagctaatctccttggtcacaagcaaaactagttgacaacattcgaagtgcgtgcaaaaagtagggattttttcaggtgatcaatcatggtattggtgctgaggtcttggatgagatgatatgcggaatccataggtttcatgaactagatgctgaggtaaggaaaaccttttacctgagacagcaataagaaagtcaaatatacttctccaatgttttaaccctttcagaggcaaggctgctaactggaggtctacaatttcattttttctatgttctgatctttccaatccagaagcaataccacttgtatgcaggtaatgttactacttactagtactaatttttcctctaacagcatgcagtttaaagatctatgatttactttggaatgtagcatcaaggaataatattgtttataaacaattgaagtttgttactttttacctaaaagactataataaagattcactttaaaaagaaaattatgatacacgaaaacagtcgagagataagtatgcatgtgaaaatattctgtttttgttttttaatattgatatttacaaaagataatacaagtgaaaaatatgatgacagttttagaagtattaattaacaacaaaaaataaaagaaaatctgcacaaaaataaaattcgcccttaataacaataagtatggaaaagttcttatatctattacatgacatatgtgtctcatctaaagtaaacaagagtataaaataagaaattagaagcatctatactgttgatttaaaattagttaagattatgaaatattttaattcaaatcaagagtcaaagtactcttactttttctcattatacacttattcactttagagcagcctaaatcctacaggaattcactcatgcatttcacttgtagaccttatcaaatttggaccttttcatgtgacacaataatcatgtgtttgtacagacattgtgatgaatactcaaagaaagtaagggcattgggctatacaatctttgagatattctcagaagcacttggcattaatccttcttaccttagaggcttagactgtgctcatggacaatttcttgtgtcactgctacccctccttccctgaacctgaattaactcttggcacttcagagcacattgatagcgacttcatgacaattcttctacaagaccagatgggtggtcttcaagttcttcatgagaatcaaagtgttgatgttcatccagtgcatagatctcttgtaaacattggggattttctacagttaagtaaatacaaaagttataataatcattatctttattttcttgtgacattcatggttgttattgttttctttgtaacaacaaaaattaacaaaagaattgcacaatgagaaattttaaagtaaatagagttgtcaatccataacctgctgtaatattcaacagtgaaggcaagaaaagacaccatgtaatgaaataataaagagaccaagcctcttcatacatagataaataataattcaatttatctgtgtatacaccttttttgttaatttacactatatacactttgtttagatgagttgaatctgactttatgttattaatttgactttacgttatgcaccctttctatcaacttcaatatactaaaggtgatataatattatgagaacctataaaataaataattataaattattgtttctatcgactctcatgaattatatggttataaaaataatttaaatatccttttaatactgtaatatatctctttctcagttttctattcaaaaaatattttttattatatcacatttataaaaaatttctttaataatgacaattaatcttgactcattaaataataatatgacaagttaacaaaatgtcacctaatttgttaaataattatgtgataaattaataaaatattatattatcatttaataaatttaaattaataataaatatcaaaagtaaaaaaattgaaaatatataaaaaaatatatattagagattgtaaattatccaaaaagtattttttattttattatttcacattttgaaattttgtttttatcaatattggtgttaatcttaatcgattaaataataaaatatcacataatttattaaataatgacgtgttaattgtaggtaacaaaggtaaaattttaaaaatatataataaaaactatatattttgtaggaaagaattatattagaggttaagtctgtgaaattattctaaataactcagcgtggttgaaaattaaatcttacccaggcataagtacgtagcgcaacaaaagcgcgcacacaccgacattatcttccacgagaaagttgggttgtagcgtaccacaccgaaccaaaaatggatgtcgccgtctccggaaactctctcgccggaacttccacaccctataaccgtttgcaagaactaaaggccttcgacgaatccaaagctggagttaaaggcctggtcgactccggcatcaccaaactcccaaaaattttcgtccggccgccagaggacctcgccgccgccgacccagtatccggcaaccctgccggtgcccagttcacgatccccataattgacctcgacggccttaccggcgagcgctccggcgtggtggctggagtccggcgggcggcggagacggtggggttcttccaggtggtgaatcacggaattccggtgaaggtgctggaggagacgatggcggcggtgcatgagttccacgagctgccacaagagttgaaggctgagtactatagcagggagcagatgaagaaggtgaagtatgggagcaactttgatttgtatcagtcaaagtatgctaattggagggacactcttttctgtgtgatgggtcctgaccctcttgatcctcaagaactgcctccaatctgtatgtaactttggacttgcaagattcaaaattttgtatctatgtggatgaactcaagttccatctgcatgttattgagattatttactccaacaaaacaaacttggatgcaattcaattggagttttaactcgaccattcacttgataaaactttgcattaaatatcattatgttatgaggtgaaaatctaattctgatgataggtaaacaaaaatacacttaaggaagtgcatctaagtctgatctcattagtttaatttctatatacggttagttgtaaaaaaatttacactattaaccaatcaaaatttatggttgatatgacttttgaggttagggacttggatatggagtgcttaagtctcacatggagtagtttaagatgctcgttgagtatttaagtgcttgaatctctcctaaacagttagtttttaagggtgtgttcccaagtgtttgggctcttattggtatcagaattggttgtgagtgaatatcaattggaattgaaaaacttttttattttagccttttaatttaagcactagtacataggataggatagaaaaaaagaatccttgaatatggatttatgtaataattgaaaaatgaaaaggcaatatttttgtacctaaaaagacatttttattgggtgatttgatcttggtttgtagggatgtagcaatggaatactctaggcaagttaagttgttggggagagttttatttgggttactatcagaagcacttggactcgaccctgaccatcttgaaggcatggattgtgcaaagggccactcaattttgtttcactattatccatcatgtcctgagcctgaactcactatgggcactaccaggcactctgatcctgatttcctcacaattctgcttcaagatcacattggagggctccaagttttgagccataatggatgggttgatgttccccctgttccaggagctctagtagtaaacattggagatctgctacaggtaacttcattctattttttctcttttactagtcaaggaatgaaacataaaatgagtctggtgtaagaactactgatctttctacatgctaagttgtatgacctaattcacaaggtttactttggaggaggcacaagaaagatatatggcaatgaaaatgtactttggtttctttccagttattagataacattgtacacgaggttttaaattgcagttgtagttgcggtttcatcattatccttaatattgcgggcaattacagacgaatgcaaccaccattgtggttgcgttgcagttgcgtttacccccaaaaaccttgatattgtggctaaaattgtggtcatggactgtcttttaaaaccttgattgtacagtttgatgctttgaacattctaaatctcattgtttgccatatagtatagatgtgaaaattcattgaattacatcagatgagtgatttagaagttcttttacaatcacaacaacattagttcattttttgagtccaagttctgttgttcatcttcagcatacagcattagccatatccttagcatacagcattaaagcatatccatgccttatccttcagatcctcaacatggtaaaagaaaaattgagcattactcacttcatcatttcacttttttcctatgaatataaggattaggcatcgactgcaatgatcggataataaggctccatggggtagatgttgatgaacaaaacatctgtctataatttgtaggactaaagattacccttcctttcctttttggcttatcacacacaactctgcctttgtatgcttgcaaacttgtgaattcagttattgaaatgattggctgaaagtggattttatgttgcaaaattgcagctaatatccaatgacaaattcaaaagtgtggagcaccgtgtgcttgcaaaccgcatagggcctagagtatcagtggcatgttttttcaccattcatttctacccatcaacaagaatatatgggcccatcaaggaactattgtcagaagaaaacccccggtttacagggaaacatcactgaaagatttcattgcttactattataataagggacttgatgggaattcagctcttgaccattttatgatatcgcgttaaatgtggaagtgtaagtctgattattcattggctttcacaatcagttattaagttgtcttaaattgcaatgatcatgcctcttatgagcaacatcaaccggttacagacataattttgaatgtaaatttatgctacactttgacatacaaagtatcttttaaatgagaaatcgaatccagctcaaactttcagctccaaccttcagatctgcttgctggttttcttaatttttgtgatagtagcatgctttatcaggtagcatctttcatccaacaattcaagactctgtggatctagaagggagttgctgacagagaaaaacactcgagtttactataggatgccacagttggaacactatgcagaccactacaatgccaaaggctgaatggtatttcagcactagaaagttaatgctgtaaaacaaaaaataggcattaaaatgaaaatgaaatatgttatattgatttgatctccctccattgtttcatttttacaattgaatggttccaacttataagtaattaaatcaataactttttattcgatgaatttacttcgaagaccaacttgcgcaaacaaagatttcggtgactcgagagaaatgcaaatcatatattttaagttttaagattatataaaaagcttatatactctccaatagtcaaatgatataactcactctcctggcctcctcccaattgatatgaagcatactttgaacctcaaatttaaataaataaacctaaacaaattctagcatcatttcatataaataaaaataggaagaaaaaacacaaatataaataccataagtagactagtgaaattgagtcatttgaacagaatgggtataaaaaatttatataaatcaagaaaataaacgattgaatatttgttgccatgaatgaaccagttattcaatagtaattgaaaacaatcgcacctagttttactctttcaataagcctctagcaatcatttctcggagaattttctctgccttatcattttcatctttttcagatagggcacaaataattgttctaaaagttatagcattgggcatgcaacctttgccttccatttttgacttcaaatccatcgcttcaccaaacaggcctgctttacaaagcccattgatcataacattatatggccaaacattcagatgacagcctttaaccaaaagatgctggaaaaactcctttgcaatctcaagtcttccacccttgcacagcccatcaagaagtattgtgtatgagtatacatctggctgaattccatgctctttcatttcctttaataatgcaattgccctctccagatgatgatttttgcacagaccatcaataagagaattataagtcacaatatcaggaatcatatttttgtgcttcatttcttcaaagagactcatagcttcatccaccatttttttcttacataacccattaatcatgatagtataacactgaacattaggagtcactcccctttgagccatagaatagaatacatattttgcgtgttttacttcattaaccaagaagtatccatctattagagaattataagtaacaacatcaggctcaacacatgctttcatcatcacagctaacacaattttagcttctttcacccttcctttcttgcctaatgcatcaatcaatatgttaaaggtacaaacatccgggttgatgtttttcaatttcatttcattcaacaaggaaaatgcttctttcaccttaccttccttgcctaatgcatcaatcaatacgctaaaggtataaacatccgggttgatgtttttcaatttcatttcattcaacaaggaaaatgcttctttcatcttaccttccttgcctaatgcatcaatcaatatgttaaaggtacaaagattggggttgatgtttttcaatttcatttcatttaacaaagaaaatgcttctttcaaatgacccatgatgcaaaagccatggatcagagtagtgtaggtgacaacatccggggaaattcccttaacaatcatttcagagtacacatcacaggcatctcccaggagtttatttttgcataagctattaattattgtattgtacatcaccacatcaggtttaaccgagtgtccttccagcttcctcagtaatcttgcgacagcctttgtctctcctgctttgcacaaaccattgatcaacgtcccataactgacttggtccaactggaacccttgagccaccacctgatcgtgaaagtaaagtgtttttttaatctccccacgaaaacagaggcctttgatgagtgtgttgagggtaattgcatccggatgaaaacccctcttgaggatgttggcgaatacagaaaaagcaagagtgatgtgagcctgatggcagaaacaattgatgaggatactcagagtacaaaggtcaggtgtaatcccatttggctcgaattgtttaaaaagggagatgacagtgggataacgcttgttcttgacaagggaactcagaatgttgttaaaaaggaaggtgggtgggggagggcgcataagaagcatgagattgaatgaggcaacagcatgatggtgatagtgaggttgagaatgggattgataatggagggttgcagttggaattgcaattgggggataaggcggaaaaagagagagcctgagtgttcttaagaatgagaaagatggcattgctaatggaaaaggaaagagagtatagatgaaggatgaatctcaggatcggcggcgttgttcctgacctactactttccacactaatatgttattctcagcatattaatttccgggtttttctaatatgtttttatgctttcaaattttgatattaactgaatttaaataataaaatgtagttttacctgaatattaatgccataattgcatgtatatatatatatatatatggacaaaatttaaataatgaggtgacaccatgaatcaacatacttaaattaaattaatagtaggtgacaaagttaaaattttaaaaatatataataaaaattatatatcttgtagactgtaaacacagaaagaattatattagaggttaagcccgtgaaattattctaaataactcagcgtggttgaaaattaaatcttacccaggcatatgtacgtagcgcaacaaaagcgcacacacagcgacattaacttccacgagaaagttgggttgtagcgtagcacaccgaaccaaaaatggatgtcgccgtcgccggaaactccacaccctataaccgtttgcaagaactaaaggccttcgacgaatccaaagctggagttaaaggcctggtcgactccggcatcaccaaactcccaaaaattttcgtccggccgccggaggacctcgccgccgccgacccagtatccgacaaccctgccggtgcccagttcacgatccccgtaattgacctcgacggccttaccggcgagcgctccggcgtggtggctggagtccggcgggcggcggagacaatggggttcttccaggtggtgaatcacggaattccgctgaaggtgctggaggagacgatggcggcggtccatgagttccacgagctgccacaagagttgaaggctgagtattatagcagggagcagatgaagaaggtgaagtatgggagcaactttgatttgtatcagtcaaagtatgctaattggagggacactcttttctgtgtgatgggtcctgaccctcttgatcctcaagaactgcctccgatctgtaggtaactttggacttgcaagattcaaaattttgtatctatgtggatgaactcaagttccatctgcatgttattgagattatttactccaacaaaacaaacttggatgcaattcaattggagttttgactcgatcattcacttgataaaagtttgcattaaatatcattatgttatgaggtgaaaatctaattctgatgatgggtaaacaaaaatacacttaaggaagtgcatctaagtctgatctcattagtttaatttctatatacggttagtgtaaaaaaaattacactattaaccaatcaaaatttatggttgatatgacttttaaggttagggacttggatatggagtgcttaagtctcacatggagtagtttaagatgctcgttgagtatttaagtgcttgaatctctcctaaacagctagtttttaagggtgtattcccaagtgtttgggctcttattggtatcagaattggttgtgagtgaatatcaattggaattgaaaaacttttttattttagccttttaatttaagcactagtacataggataggatagaaaaaaagaatccttgaatatgggtttatgtaataatagaaaaatgaaaaggcaatatttttgtacctaaaaagacatttttattgggtgatttgatcttggtttgtagggatgtagcaatggaatactctaggcaagttcagttgttggggagagttttatttgggttactatcagaagcacttggactcgaccctgaccatcttgaaggcatggattgtgcaaagggccactcaattttgtttcactattatccatcatgtcctgagcctgaactcactatgggcactaccaggcactctgatcctgatttcctcacaattctgcttcaagatcacattggagggctccaagttttgggcccttatggatgggttgatgttccccctgttcctggagctctagtagtaaacattggagatctgctacaggtaacttcattctattttttctcttttactagtcaaggaatgaaacataaaatgagtctggtgtaagaactacttatctttctacatgctaagttgtatgacctaattcacaaggtttactttgaaggaggcacaagaaagatatatagtaatgaaaacgtactttggtttctttccatttattagataacattgtacacaaggttttaaattgcagttgtagttgcagtttcatcattatccttaatattgtgggcaactacggacgaatgcagccaccattgtggttgcgtttacccccaaaaaccttgatattgtagctaaaatcatggtcctggactgttttttaaaacattgtacagtttgatgctttgaacattctaaatctcaatgtttgccatatagtatagatgtgaattcattgaattacatcagatgagttatttagaagttcttttaacaatcacaacaacatcagttcattttttgagtccaagttctattgttcatcttcagcatacagcattagccatatccttagcatacagcattaaagcatatccatgccttatccttcagatcctcaacatggtaaaagaaaaattgagcattactcgcaccatcatttcacttttttcctatgaatataaggattaggcatcaactgcaatgatcggataatgaggctccatggggtagatgttgatgaacaacagcgtctgtctatataatttgtagggctaaagattacccttcctttcctttttggcttatcacacacaactctctgtctttttaagcttgcaagcttgtgaattcagttattcaaatgaagaaatgattggctgaaagtggattttatgttgcaaaattgcagctaatatccaatgacaaattcaaaagtgtggagcaccgtgtgcttgcaaaccgcatagggcctagagtatcagtggcatgttttttcactcttcatctctacccaacaacaagaatatatgggcccatcaaggaactattgtcagaagaaaaacccccggtttacagggaaacatcactgaaagatttcattgcttactatgataataagggacttgatgggaattcagctcttgaccattttatgatatcgcgttaaatatggaagtgtaagtctgattattcattggctttcacaatcagttattaagttgtcttaaattgcaatgatcatgcttcttatgagcaacatcaaccggttacagacataattttgaatgtaaatttgtgcacactttgacatacaaagtatcttctaaatgagaaatccaatccagctcaaactttcggctccaaccttcagatctgcttgctggttttcttaatttttgtgataatttattgccagaagataatactgtctgcattcgtttattttagttacatatggaagaaattatcatattaaaatatgatagctattttagtggacttcatactcccactgcaaagtgtgtgtttgtaatttgattgctatcaaggttttaaaaaaaacggtctgtgaccttgaccttgattcgggctgcaacatcaaggttttttaattgtctgccacggcagttggaacctcatcggttgcatttgttgcgatatcaacaaacgcaacaaaactacaacctcgtcggttgcatttgtcgcgatatcaacaaacgcaacaaaactacaacgccacagcagccaatatttgaaacatcgactgctatagaaactacacattgtagcaattaaagaaggccaacggcattctcttcattgacttaatgtctcaacctgtctcatagctaatcatgaattagtttctaacccttcatggcaggctcaacgagttatagtagcatgctttatcaggtagcatctttcatccaacaattcaagactctatggacctagaagggagttgctgacagagaaaaacactcgagtttactaggacatcacagttggaacactatgcagaacactacaatgccaaaggctgaatggtatttcagcactaaaaagttaactctgtaaaacaaaaattaaataggcattaaaatgaaaatgaaatatgttatattgatttgatctccctccaatgtttcatttttacaattgaatggttccaacttataagtaattaagtcaataacttttttattcgatgaatttacttcgaagaccaacatgggcaaacaaaattttaggtgactcgagagagaaaatagatgaagggtgaatctttgggtctgcggcgtagttcctttaggcctactaagtacgaaccatattgacatttttcaagaaatggaaaatgtcttgatttgttacaattcgatgaatcatgattcacctgaataaaaaagaaatgaattgtgattatttgaataggtttaatggattgaacctagatcaaactttatgatcttaattaattttttttggtaaatcctgcaatatcacattattatggagatttctctaactttttactttaatagaaaattaaattttatcatcttaaataattttttgtaactcccacattaaacacatctttaaatatttatttacaatttactttaaaataattaaactaattaattatatattttaattacaaaaatatttgtcaattccccctccccttaagccgtcctccctccatgcccccatcctctctctcctccctcaaatttgtaatttttggtttgttgttattgttgttattcttctccttatacttccttcgttttgttttgttttttttttcttctcttgtttcccgctttagttgtggagagaggctttaaaataacatcttctgggttcatgggtaaatccttgttgttcttgtaaaagaacaaatcttcacgatggagatttatgtttttactccaataacaacagatcttaagaagattaaattttacatagaagattagggtgtaaaaacacctattgtaaaaggttgaatagatgtacaataatttaaatttaaattttattattattattgtacacaatatttggtgttttgaagatgggaacagttgttaactcagtcaaagttagtatttaatagtaaaatataaaatataactatatatatatatatatatatatatatatatatatatattatttgtatcataagtttagtgattattcatggtgaaatctagtggtaatttgatttggattgattataccactgattcttgatccattttgtgggatcgatcaatccgaaccaatttaaaacactaattagaaatatgctcaacatgttagttttcagtttttgacagaaaatatcttgactttaaaagaaagaaaaataaagtagtgaagtgtatatgaacaaaataatagcccctactgacattttatgcgaatattaataccatgaggacaactaattagaattaattagctgtaaaaaaaactaaatagaactaattacgacacaacttataattgttcttaagtttataaagaaatactgtatcaaatagaacgtgataccgatgtgagattaaataattcatagtgtaattttttaaaagtaaccatatgtgattctcgatttgccagctctaccgaaatgtacttccgtaagtgggtttaattttaaactcttaattaatctgcttgtaactgttgccacgtatttatataatataaagttgttattaataatatacaatgagatacgacaaggaggaaaatctttggcaagtcccatgtaaatttttaaatgcaggtgaagtgtagcattattctttaatcttgatttcacatattctaattgaagattcgatatccttcaatgacttgaacataaaacattcttctacgtgaaaggggccaaggatgagaggaaatttctaggtattaatttttaacttaagatggaaaatgtaaggaaaagaaaggtaatatttcaaaatttctcataatatatattgttttatttttataatttagaaataaggaagatgagcttagcagcacggaacaataaaatgaaatcaaggccagaggaaaaggagaaatgatggtgacatgagaaattggaaataaggagacaaattacaattatgtggatacacgcaaaaataatgatttggttccctattaatcatattaatttaatattaggaataaaaacataaatatttttttaagtttttttttcaataatcacactaaaatccatacctaaaatctcataaatacaatccgaacctcctatcactaagtgtggttcattttcaagtttaatttaaacaactttttattcttataaaaagattaattttttatttattttttatattttaatattttgtcctaatacttaattttagagtcaaaagaaattcccctaattgcaataccagaggtaccaaaactgtcacaaaagttttattatagatacatgtacaataatttcaagaattacttttttgagcaaatgttgtgaggattgttacatatcctagcttgcttaagaagatactgtcttgcctaggagattgaagattgaatatggtgcaacataatattaatttattatatttgttttcgggttggatgttataatatatttattgtttcatatttttaatattattaattgacttatattaatttattatatttgttttcgggttggatgttataatatatttattgtttcatatttttaatattattaattgacttatttatatacagatatgtacatgactaatgtatctaactttaaaataattttcatatgcacacaggcacgttagtcaattagtaatgctaaaaaattataagtagtaaacatattacaacattcaacatatctaagtgcaaccaattttggtagaatgtattcaattacattcgttaaataacatcatatataattattaggataaaaatgtattatttggtaaacttaaaagatcagactcaaatcatctaaaaaaactcaaagtaccaaaatagttctagaactatttaaaaatataaaaaaccaaaataaaacaacttaaaatgatatcatttcaattaacttatatgacatttcacttcaacaaaaagtaaaacgccacccttcaaaaaaaatattttaaaatttaatgtatcaaaacgaaaaaaaaaaaacactaaaacataaagaaaaaaattaacattgaacctattataaagcatttttcaaaatttatcaattctcattataaaattttgacctctaaatatttaacattatttcatattctcaatccaccataaactctcaagtattcaagtagaaaataatcatgtgaggattttaggtaaaaaatttgatgaaatgataaaatttacaatcggaaaaataaattaacttaaaaagaacacaataaaatataattacacataatgtaaattagaaagaacaaaagtgcatcaagttttgttctctgcatgggatgcctaattgttggatctcagcatatatctactaattatattcatatcttgtttgagtgtatctttgatagggaaataaagatcaatccctcgagaaatccatttaagaaaattaagtcgataatgggtgctcaaatgagtgatggtaggggacaggaggagcatggggtaaaccagataaaataatacttattttcataataataaagtctcacattatttaaaaattaaaataattatttatatatattttttctcaacttattaaaacactttttaataaagataatatcgtgatagttgaatgaatatctaaccaaataatatctttaagatacaaaatatgggaactctaaccatgttaataaacttgaggtcgaaataatacctacaataaaaaaatgaaacaaaattcatgtaaaaaatcatttatttttcctatttcaaacacacatttttttttatagttttcatcgtgagcattatcgttagtgctcctttttgttttccaccagtgaggattgcatattctcaaaggtaacagaaccaaattttgcaattattagcattttgacctaatcagcactttgttttatgacttggttggacaaatcaaaccaatcctcgatgcctactcagccttatgctgactcagtgccaggtatgcattatttgttctgcattcctcgacgaaacacacgagagccagagaactagtggatgtacgcaattttaaagaaaatttgaaggggtaaagaaacttaattattaatctcctatcaacttcaactacattatatataatattcaaatttgtggcttaaatttttttacctttatataagacttgtggggtccaaattttatgagtaaaaaaaaaagaaataggaaagagagactatgttaaaagtttggtattattattattactattattttaagttaggtaaaaaattatagatatcccacaacacattaggtcaattagggatgatatatatgataaaatgcagtattatccttcgttcaaaaaacttcacaaacaataaaaattaaatacaaattttttttagtaattaaattgttcttaataaatgcatcaagattttatactgtgacaaccacaaccctttgggttaatgtcaacttatctatgatattcattataaaaaaattattatataaactacacttattctgtgaattcttgaaattgcatacattctctcttttttttttttttttgcgtttgtaacatgatgcaatatttaaaataataattaaaggagttagtataatatataattgtataaatgatatcattgtaatgcttctcaaataattgagaataattagtgtaaaggtaaaaaatggaaaatattgaaaaaaaattgacgaaattatatagagtgccagtataacttatttaaaattattttaacaaaagaaaggatgacttttcacttttttgttaaagaaaaagtgaaaatacttttttatatataattagtgaaagatactaaattacacgtaatgtatagaagttaattaattaataatcttgtctctctctgtaaaacagcaagataggaccaccaattcttttattttaaggtatcaatggatcatgcctatgcttttaggttcaaacaatcgatagatgccaatgtacgacctttgcatcgacacctccatatattaggtaaataaatatatgtctttgtttttgtttttgtttttgtttgatgtgcttgctagacgtaacagcgaacaacactattttgtttcttatgcctgaaacccaaagtggataagatcgtactctggccacaagtctagaatataggaaacaatttttttataagaatactcggaagattaatttaaaatgaagaaggagaagaaagaaaccacagttattatattatatgctaaattataattgtaatccttatgtacttttaaatatgtaattttggttttttatttttaaatcaaaatatttagttttcttattttttaaaataaatatttttagtcattttcatcatttgatcatcaaaagtgaaacattaattttgatgtagtgttttggatggctgatatgtcacttgtatagacaattgacttgatgcatatataataagagattaaataaagtgaaaataatttttttttatagaaattgaaatttatgtcattttatttaaagataaactaataaatcattaaaatacttagttaattttataaatattatattatatgtatcatggttgattagtcaagagttattattttttttaattacaaaaatttataaattaaaataaaatatttaatatttaattttacatgaatttttattataaaattttattttaatataaattaatatatatatatatatatataattgttcttattttattataattttaagaaaaattatataaactaatatatagatttttaaaaaattactttatgtaatttatacaaattttgtaaatttaaaataatatttaaataatataaaaattaaaaatttattacttttgataattagaatttttttattatttatatataaatataaatgtacataatttttataaattacatcaaataatttatatattaatttatgtaattttcttgatttatataattggtattaaaaaattatttactaaatagttttttgtagttaagacaaaactattaacatataagtttcctaaaaaattaaatactaaaattttattaatttatataattagaattagaatttaaaaaatacatattaattgatacaattatattaatttatataattaaagtaaaaataatatttatattaaaataaaattataaaataattaatgtaaataacttatatattaatttatgaaatttaatcataaatttgtaaaataaaaataaaaatatgtaaactacgtaaaattgaaatatataaaattatatgaaataaaattaaaaatatttatatattaaattttaatttatcaatttttatcatttaaaaaaattaataactcttgactagtgatacatacaaaataatatttataaagttaactaaatgtgtctttaaggatttattatcatattcttgaataaaggtcataagtttaactcctatcaattttttttttatttttcattttacttaatctcttgtcacataagcacatgttattactaatacattacttcaaagtcaatatttaattttggatgatcaactaacggtcacatgatgaaagaatcaaaattatttattctgaaaaatataaagagactaaatatcttaatttaaaaataagaagaccaaaattacaaattttaaattataaagagacaaaaatcgtggaacaccaaattacaatttagtctatattataatataaaatatatttatactcctttatttcattgcaattttgtttttatctttcaaaaaaaagtatgaatgcttttaattctaaaaaaattaatcatgaaatttagttcttcccatatctcttactttttaaatgatgatatgtcagtcatattactttccacacacattttatcacaaatgagagccatatggcaaaatgtatgtgtggaacttttgttatttagtttttggtggtggatgcagaacggttatggtggtattttggtgcttgggatgttgattcattggattttgttggcaatggtggagtgttgtcgtgcattatggcaagtctggagtgtggtagctagtgttaatggtatacatatggtgttgacatgcatggtgttattgagtattgtaggtgttattatgttataatgtgttgtttatcatgcatgcttaagtctcaacttgctatattgcaggtagtagaaaagtttatactcgatttcaacttctagaataaggctcaaattaacctgatttgtactaaccttttgcatgttaacgcccagatcaaaccatgaccttttgatttttacttaagatttgatttcaaaatatgaaaattgaacagcccaaaaatttgtaactaatataattatgaaaatgaaaattagttttaatttttaaattttccaaaatttaaaattgtcaatcatactcaacaaagtcttaaactattttttcctacatactacactcaataatttcatataaatttgacttccaaacaattatataataaaagataaaatccttatcgacaagaaatgagtacaataaataagtcgtactcttaatcataaaaccaagtctaaatttaaagaatttattttttaaaaaaatccttgtcaatgtacaaaaacataattgcaaaaataacttgaaagctaagctttcatatggaatatacatcttttttcttgtatttatatttaagagattgtctgttatagaaaaaaataatatatatataagttgattttatataaaattaattagtatttttttacataactaataataaactatttcgtaacaaaatttgtgtgtttttctaaaaacatttattgctagtgaataatctaaaaagcaaggtttgattgatatgctttgcaaatgttttattggtttcttttattgtgccatagttaatcaaattatttctttcaacatcgaaaaacaagactttccaaaaataaaatagaaactccaaaattaatgtgttgaaacttgaaatgaacttgccacatggataccgcaccaaatcttctaatcgagacttctgatcttacgatgtgactttccagttcgtaatattaatgaatgaatttaattcaatccatgcactttggataagtgtctccccataacttaattctctttcaattttcaaatctatcgctctttgatcttaacaagtgcgacggcacagtttgctacataaacatcagccaaagttggcatgcattgaattgttctaaagtgcaaattgagattatttttttggatgacttaaactacatacccgtttactaaatatttaaaagtttgttagttcatttaattgtttgactgaaagtttccctgaacatccttcttaaccaataaattagttcatgaacccattaattagaaagttcttcttcttttagataaaagttctttgttgtatgtactaaacaaaaaaaattataaccaaatggggtttaacacaattagtagataattaaattcattgagcatgttgttaaggattagattctcgtcatatgtatggaaaaaaattgttgagaaaaacaaaacttattttaatatttttatgcgtcaaaagaaattattctttcaactatatgttgggatattattagtgaaaacaaaaaagataaaaagcttttatcatatgagtaagatttataatttttaaaccaattgataatatatattatatatcaaaattaatgtataatacatattatatatatatatatatatatatatatatataatattattaattatattatatcattattaaccatatctgttacaaaatctaatgcaagtaatcaagataacatatatttacgatttaatgattaaatcaataaaaaaacatttaataaacttttaaatagcctaaaaatattatatatgctttaaatcaatgtaaatcgaccttctacaaaaacaaaagcttccaacctctcgttgcgtagaagttagaacttagaatattgaacgctgaattttattaaaaatgagacgagatttatagggattattggcatcgaataccatattctaatccatatccacaacaacaaaaataatacaaatttgaagaaagaaaaaaacatcagctaggagggagaatatagctagccgaataggccacccacagtctccacacataataatcgaaaaaggatgcaattaaatgaattaatcaacaccccacaaagtcccccatatgatattcgtgcacactcatggacacgtccacttttttatttaattaccaattatttttcatgttccaaattagaagaagaaatggacccaaataattaattttcacttttaattattatactatacttttgctcaagctccccaccacaagtggtctttcttataaagccaaaaattcaatgtgtcacaaccccttctctttcttcatccaaactcaaacacaataaaatgcaaacaccttcatcagttgctccttctttctctcttatgctctatcaccttctcctttaccactgaaccaacacaacaacaacccctttatatactctccaatctcttcaattcaacaaacccaacacatatatcattcttttgtgttctcaattttcataaactatatgggggccggtgtttctacaactgcaatagaaaatgatgatgggggcactttttctttgtcaacaaagactacccttgatgatatccctgagaattgcatctcttcaatgatgatgagttttgatccacaagagatttgcacattggcaagagtgaataaggcctttcacagagcttcctctgctgactttgtgtgggaatcaaagttgcccccaagctataaattccttctaaataaagtacttggtgaacaaaatcttggttccatgaccaagaaagagatctatgccaaactgtgtagaccaaatttctttgatggtgccaacaaagtaagttgctcaataatcttcatagttatatagtggatcggttcttcagcatcattatctttcattaatgattaatttcagattagtggtgtgcctttccctttcaaattttatttttgtgttttcaattttcactttctcttcattgcattgacaagtttgattcgatttaatttgtaacatttgttcctttgtgatatgattgtttaggaagtttggctggacagaagcagaggacaagtttgtatgttcatttcatcaaaatccttcaagattacaggaatagatgatagaagatattggaataatattccaactgaggaatccaggtgagagagtagcagatattttttttatgaatttcaatttttttaaattgaaaatttaccaaatatagttttttttaatcaaattttatatatacacgcaatacaagaaactaagatcgtgtaactggttaaggttgtaagataggcttgcctgtgttttcataaattggaaggaaaaaaaaattaaggtatatgtctatatgaagagaaaagtcaaaaaacagatcattacgcgtgtatttcttttgattatataatttattttcttatggttcatgttgcaatcaacattaagcttgttttcttcatcgatgaggtaaatatataaaattttaaatagaactttttcagtaaaagtcattttcgaacaaatccatcatcaacacatggaagggaaagtcgttttcttgttgtatatatgcatttggcgcgtcctttctataagtacaatcaggcacatatatatagtaaacgtttattttctgcaaaataataaatggttattttaattaattatttgaagaataaaataataatagttatttatttaaaataagttgaaccatacatccactataattcaactccaaacaaattatcctctgtgatttaagtatacatactgtaaagtaaacggcaatttcttttctgaaatgctttcatcataaaattttgcaattattttcattttttttatcaaacaaattatcaaaacctctctttcagttatgcacatcgtttcttaaagtaactattcgtctttgacttattttacttatatttttaatatacgtttttctttatcagagtgcattgcactttatgagagtattagaaattttctcattttcaaccttattaattaatacaagcaaaaaagtttaggtgtagagtctacttaccgtgatttagggacaaagaaagaattcgcatatgattatacgcccatattttaataaaaataattgaccttattttaatgtcccccctttgataaccttgtaagaaattcaaactatttgcttgagggaaacattgatatttttattaattacgatggcaagaacacttataaaatgttttatgactcttgatgatagaaaatccatgacaagtggcttgttttggtatatttttctcaaaaagcctcttggcaatttgctttaccatattcgggaaagcgattcgtcctagtcagccattcacatcttgtaggtaattaaagaacaaagaacgaaagtgcaagcaatttgcacttagagaattccttaaaaataagttgagaaggacttctatagaaaagtaatcaagcaattattaaagatcagactattgtctactaactcttcctagtcaccatcttgtagataaataaagaacaaagaacaagagtgcaagcaagttgcatttataaaatgttatgaaatagctgaaaaggacttctattcaaggaaaagtaacattaatcaattaacattgtatatttaaggcatggtagttgaagatcatatatccaaacacaacgaaagcatctttgttctgttgtttctcttttactaataaaaagtcatctatcataaattacttatagtaaaaattgttcataaaattgaaaacatgcaataaaattggctcaggaattttttttccaataaaacattatcgcatacttgtagcatgttatgtaaaattatcattacattcgtatttggatacatgcaatctcaattagtttacaagttacaaattttcctatcaataaaacaaatagaactccttttgtgtcttaacccctaccctctttataaaatgatatctatggagatgctctagctaatgagccgaaagcaaaaagaaaaggttctgttttccacggttaaacaaggattccaactccactacatattaaggttattttgctttttccttaaaatttttgaataaaaatttaataatatattttatatgagaaattatacaataattcattcccaaaaaaatgtcagttttaaagatgaaattatcttattataacaaaaaaaaacagaaatacttatgcgcaaaattggtgaaaatttgcacaataattatctttgccctcttaatatgaaactaagaagctcttaattagaacaaggaatccaaatctcaattttatgcaatacattacttattgcaaatatttgatttaaatctctttgagtcgaaataaaacaagcttagtttaacattgtttataatcatgcaggttcaagagtgttgcatatcttcaacaaatgtggtgggttgaagtaataggggagctagagtttgagtttccaaaagggaactatagtgtatttttcaagcttcaattgggcaagccctcaaagagattgggccggcgagtgtgcaaccttgatcaagtgcatggatgggacatcaagcccgttagatttcaactatctacatcggacggccagcgttcactctcccagtgctatttgcgtgggtccggagagtgggcccactaccatgttggtgactttgcaatcgataagcccaatgggccaaccaacatcaacttctccttggcccaaattgattgcactcacaccaaaggtggtctttgcatagatggggtagtgatttgcccgaaggagttcacagaaagattgaaacaattttagcaaagtataatttagtttgtgtttttaatcaatcacttttgtgagagcaaaattaggtctaggtctctctctcttttgtgtattttttaattattttagaattttcaaattattggctcttttaggaagacttacttaggggcactctatttttgttagaaaggaagtcttaaatgatgtgggaagagaaaaagaaagtggaaaagaataatgaattttgagcccaaacagtttagggacaaagatttgtgttacttaaaccacaactcttgtactgggtgctcttatttttgtgcagctgtgagtatctctttgcttgtttgtaaaaaaattaaaatatgtgaaatagttttgagttttgactgttgcatttaatgttatataatatggagtaacttgtgaagtttgtgattgtttaccttcggactgctattctcaccccttcccttcatttttgctattcccacttccttcctttggaaaggatatttttggaataagaaagatacactaaagcttgggatgggaatagcaaaaagaaatgtgagaatggcaactctctttaccttcatattttaaaccattctctatcaaatttactaatgtctttcttttgtatatcaaacaaaaatacgtattaataatacattttgtaacacagtttctattattatttaaaatttaagcaaaactactaaataatgtaatttttattatatttaatgaatctcatttatattttataatttaataatttttaattaataataaataatattttaaaaataatgtacttaaaattgttttaatagtgttttacttccatataaaataaaaaatacttttgtaaattacacgaataattgattttttcactgtagggaaataatattttatttttatgttgacgtcgtgaggatacaaggtgatcttgtcgagaggaagcgaaaatggacaacaaatcaatacacttctcaatttacatttataaactatctaaacatacactgaatattgtacttactgtttaagataagttagccaagtcaaatcactttaattatttttgtaatcaactaatcatacaatcacatggtctgtgatccaaaaaactcagaatttgaaaaaaaaaataccggttaaattaacttctagattctatatgtctgaattatttaagttattaattattttaactaggtcttaaatttatatgtacttttaattaagtcctaatgcagtatgtaattaaaaaaacaaatacaaagacctaattaaatgacaaatacaagatctgtgactcaattaaaataaaaaaattcaaggatatagttaaaatttaataaaagttcataaacccatagagtaattaaaccaattttatcctactcaatttttcttttttctctttttcacctttcccaccttttttttgtccttcttctcaaaaacctattttgttatttatatgtttcttcaacattcttctctttaaaaaaaggttaaattaccatttcaatcttcctataatttttaatatgtattttttatcatcttgctttaattgttattataattgtggtcctctatttttaaaaaaaatcacaattttaattcattcttcaattttacatatatatatatatatatatatttttttttttttattttggtccaattgtattctagacacagcatattcacttacaatagcataaaaaataatttaattaattgaaatataaaagtgtacctaaaattgtaaactgaaccaaaattgcaaaaaaatttaaaataggaacactcaaatcgcaaaaacaaaaaagaagatcaaaatcacaaattaaatattgcatgagaatcaaaattataaattaacctaaaaaattggaaaaaaaaaaactacattttttcctctgtacttctccctcccaaatttcatccttttcatgttgattgtattatcatatgtttttttcttctaaaccataagtattctcaaatagaggaattctattcgagtaagatagatatgaacataaaatatttttttaagacttaaatctgataccactaattaatctaaaataacttaatcacaattaattaataaatcacgcttggactataacaaaacacttatgaaaaataaaatattttaatagtatcaaatagcatagtggtacaagcaaaaatcacattttttatttataagaattaaataaatatatcaagaaaaaagttatacatcgtttttatataaatgaatgtaataaaataaattttatacctcatattaatttgtctccaaatcaaaaacaattattatcataaaaagataattttgattcaccttaaaaacataaaaatattaaaataaacttttaaaagataaaagaaaaaaatataacaaaaagaacataaaagtgtattttagtgtaatttacagtaattgaagttttgtgttgtaagtatatccattatttattcataaaataatggtacaataaagaattaacaaaatagtatacaataatttattcgatcctgtcttatcctctacgaacctgccttaaaattaattgattgttcccatcatcaatatctacgctaaaattgatctaaatagattgttctactcaacaatatctacgctaaattcatcatcgtgatgatgtttctgtttcttctgaaaaaggtatcacacataaatctagagaagtgttgacccattctcatctgcaactacaaacactctctgtccttgacagacagctgttccaaacccaacatcattcacctgctcccaccattccatttcctctttctttctcccacctctctcatatcttcagatccatcactctctttgcagaaaaaaaaggttaccccttttccatattttacctttcaaactctctctctctgtatgtatatataaagtctctttctcatgtttccttacttgggtgtagctttatttggtcatcaatttaattgcctgaccaaagtaaccatctcgttcccttttctgctttgttgaaatgccatgacagttcagatttgtaggaagcttattggaagaaaaatagtaagttagaaatagacatgtttagatattttccttttttttaaaaaaaaaatcttttttggctcataatttagtcaattttcaagtgacacaatttttgtatagttgaataatttttgggtagccaattcgttaagtcaatttctctgcttgccaaactttggggtagtcaaaattttcaagtttttgatgtccagtgctttaattgcgatagggtctatgatttttaatgaaggaaataatttcaactcgttatgtggaattttccttaaattccaccaaacttaattgatttttggtgaaatgctagttgcttgaagaaattttcttccaaatcaccaagtgttttggcatcagtatgggtggcattgatgattgatctttggctgttctgtttgttatcaggctttgatatttggaaatgtctgaagtgagaaacaaagtggatttcatccagttgcttggacctgacatgtcaatcaagattctcacccatttggatgacccttgtgatcttattcgggtttcttctgtttccagttcttggcaccgatttggtaagccattagagtttaattacttgtagtggtagcgtttgtgtttttgactttttgtccaaaaagtgcatattgcttgaatgctgatttctttggaaaggttttgtttatgctatattaaatttgttatggcttctaaattttttaagttaaataatgctatattgtcctgtatgttttattttcgatatgctctgattttttatttgaagtttgaaatatagtgcattgagtaatcattgttctttggctttattatgctatttatatggtattaatacccagtctaaatattctgcagttattgaacatggcctctgcaagcaactttgcttgaaaatgtttcctgaaatatctggtgttgctcatataattgagcttgacaacattattgaaccactaagcaacactcttggcagttatgtaagttgggagtctcataagagaaatcatagagtctatgcatttttggcttctggtcttactcctatgaggaaaaattgcatctcaaaagccattagtgcatccagcactgataactaccctgaagaaagcattctacatacgttggagcctggggatagaactgaatatagagcatcatactggtcaagcaaaggggaaagcgatccttctgttcctgagactttagtttatgagctagcttcaaaattatgtcttgttacggagatttatgtccatccattccaaggttagcctggtagctaaattaaactccattgtgtatcaagttaatctgaaaaatgggtatgttgaggatcatgaacttttgcttaatcatctgacaaagaatctatgtttacttgtcagcatattttcagcatggcttccctatatattctgctaaggctgtccgattcagaatgggccattcgaaacacccaatggaattagagagtcctgtggacaacatggctgctaatcacgtcttgggcaataatcaattcatatggacatatacatcacctgaatttccaatgcttcaagtgagttgcactatcaaaatgcaggttttgcatattcttttttatccattcaatttattcaacgaagaggaagcttgaagttgagattcatctactggcttttttctgggaatcatccacttatgaaattctcattcttggtttactggtagttggtagttgcagactgcagctatattaattactgggtagtaatgctaacaatattctgaaagccttaaatcttgcttttagatagcaaagaggaattgcttgcatcctttgggacctgagtcctgtgatctgaggcacacttcaggtatcattcagatggagaatttatgtcaagaacaggatcagtcagggcagctatagtggatgtacgggtaccctttctggttcagggaacacttttgttgggcttattcaagaataacactgattcaattaatgattcagaaaaaaaaaatagtgtgcaaaagggaagtagagctacaatgtgctccaccattcataagcccagtagccataggggatacacacaacaaagcagcgagctagggagctgtcatatcaggaatttggcagaagggaaaagggtagatgttttcagtgtggcctaccatttggtctcatgcctaggtgcctcaaagtaagtatgagggtcatgattttgacagatgaatgtgtgtgaaaaggggggattgttaaagatggtaattctgggaggaaggacagtgtgaaggatatggctactatagtactatcagatcttggttccccaatttcaccattgtggacaaggttgaggttatggttctgataggctcacatgagtagtaatgtctaaatagttaagtggtttggcggataaaattgttaacattagggtcttgtatatatagtagaagaggggtaaaagagggcaatcagatttgttagttttggaaacagaatagggactctgttgtgaaaggggcaacacgttgttgtagggaaaactcgtgaaactcggaagcagaattctatcccttttctgttgagattcaacaaacccttgcaattttgttctctttctctcaagctttctcagttctttctgttgtgggtttgtaacagttttagtaatagcaaatcttcagtttgattaattggcaggttgggatgaatgaagtgaccaaatgttaatatttaatgaaatgaacgctggattatcactcaagtctattttttttctttcttttttttggcggagtgacctcatgttttacctgctgaatatagcaagcatggattagacatttatccattttagattgaaaatgtatttttttttttacaatacagtattctatgcatgtgtttgacacttgcaataggttagtgacatactgactttacaggaaaaccgcttgcaaaaattcaagctacctgaacctgttctgtgcattggaggtgtactgctagttgagctgttgggtagagttcaaaagcaagaaatggatgaattattctatatatggtttgtttctcaaaccttctgtttttctctttcaatttaacgctgaatcagaatagagaacttgatctctttcctttccatctgttctttcatgatatccatgccattcacgggttttgatggaaattcagcatattattccttgcatttatcttcgaaagatgaaagctaatgcaacaacagataatattttattgaaatgcaatacttctatctatactggatgctgaataatttcatcatgtcaattagcttctttctttaagagttctttttgttagttcattgcctacatcttaattagcttttcagttgtttctaacttgatcaaaatttccagtccacgagttacttgtcttgatttcctaatgtagaatgattttttattttgagaaacaattgccatctgtttgctgatctgtttttcatctttgataaattggattactatatatggtgcagcatctctcatgttcaagttatgggacgactgctttttccggaatttgatgtcaaaattcatcattggtcaggaaagtgtaccttgaaatactgccctcaaacagattgttatatgtcttctccaacatcatcaccgagaagcaactcgagtaatccgtcacgcctgcggaccataacctcaagcataatgcagaggggtgtgagacgttgggagcaatttctcttgggtgcattgcttggtactggtcctgttgtagttgataatgaagatcaatgaaaaaaaaaaatgtaagtaataaagtacttccattctcaaatggaagatattggtcccaatatctgtatagcatggaatatgttgagcacaataataagtagggggaagaggcaaagtttcatctttatttgtttctttctgttacataagtcttgtcttcatggctagttattaaggataggttgtacacaaattttctggcggctcgaattgataacgaaatttgtattgatgataagaaggatgatggagtacttctaccacgtattctacataatcacgtgttccaacctggtggcaactgatacagacaatcctcttgtttgaacctttaaaatatgccattcagattgggtccctatgatgaaatatgtgcatatgcaaaataattgtaagtatcatcatcatgttgttcctgtctttggtcatattggtagggattggttacttagaatttaatcttataatcatttaatgctatgtaaccaattggaggtctataaatctctctcctttgtaactgattggctttcccatacgttataatatattctattttgttgaccaaaaacaaaaaattgattcatataacgccatactctgaaacttttgctttctcatggcaatcgggtgcaaatgcgtttcgttttcttggattaggtgtttaggtggatctgaccgagtctgtcaattaattcgattccatcccattttattagaattttatagtttggattgggtcattagattaaaatttattttatttgtataaatctaattgttattggattgagtgactagtttaaaattttggcttcatcaaaatccaatctaatcatggtatactaaaacaaatataacaaaatactaattatatattatgtactaaaacttagtagtaaattattaatatgaaaattagaaagctctaaaagtcactcattctcagcaggccgcagtagagtttcttcctaaaatcagcatcatcttagttgctagttgtcacgaccataattgtaaaaccataatagaaggaggcatggagcagaggaacaaaggaatgacattaattggcttatcttttgtaaaacaatttgagttgtaaaataatatatttatggtttatctttttctatttttcttatgagaaatacagtgttttatcccttactttttttgagtttggaattttcttttcaaaaattaaagaagggattattttttaatgacccaatctgataatcaaccaacctaaatctaataaaatttaatccaattcaaatcacttacacatgttctaagatgaatggcacttaggtttcctaagcggctatctacactttgttgagtggacactgcataaacaaagcctataaattccattcattgtaacattatttcttctaaacttgtttcctctgtcacattctctcgtttctcccattgcaacgagtgttctctcaaagagatgcaaccctctctctctggtgctcagttccctcttggaggaggattttttcataaatttatttgtccactttttataggatttttttttttaatttctagatgaattaattatttttttcttacatacctttacttaattattatctctctaaatattaatgagaaatattaaattgatagaaggacaagaaaaaatgtaatttttgagtaataatacaaataattaacatatttaatatgattaattaaattaactactttttttaaaaaacataaattagataaaaagttcttataattaattatggaggagaattgttaatgagcataacaacaacattgatgaaagcttatcttatccccaatttgttcctagatgcatgtcattattgcacctcaaagtgtgctgtctaaaagattacggtggttctgagtgggaatttgtatttgtaagatatgttaagcagaatgcaagatcattacgagacatgacacttagctgcagtaataaagtaaatgaaggggaaaagcacgagatgttaagaagactatcattgtgcacaaggctctctccaacttgtacactttgatttacatagtagtaaaatgatctttgagtagctgcaacttgcaagtaactttgtgatgttttcatttgataagttgacattcagattgtctgattatgtctctaatcaagttggacggacaacaaattcttacataatattctgcaattacagtgtatgcattatgtattgattgttataatgtgcatttaacattataaagatgagttttttttttagtaattaaggataatttgaaacttatcaattactgaaatagacctttgtgctaacgtaaatctagcaaactgttttttttatgtggggaaacggttgcttcaattatgcctacgagcaaatgctattttaatttcaaaattttcgcaactagctaatactctatttataggaatgttattaagatgtttcgtggatagtatggttttattctagaaaggattgttaacaacataatttctaagtctttataccatactttttatcattacaaaattaaaaattacaaaattatgagtttgatctattagtaataagtgaaacacataaaactgagtaaatttctgtcgatgctacgaatttggtgtggggattaaaatagaaactagtcaccggattgaatcaaaattcaaacaactccggagactatgagtaaaatttggttgcaaagaaaataagttttaacttttttttatcccaattttatttttatttttttctatacataaaggcttatgaaagatatttatatatgcattactgttgttattcaactattactccttggtgcttggtggtttttataaaattcattcaataatgtctcttatattaattatttaaactaaaatactactaattaaaaaagagaatgtaatgacaaacaaataaaagagaaatagagaaatattaatgataaggataattttttaaaattaaataaatttattgttattaaatatcaattaaattaatcattctcttcaatactaatgaattaagtaattgagccatataattaatactaagaaaatatttaactatttaatatgaatttttaactaaaagaacacttaatgtgattactattattcaactatttattaagaatttttaactaagaacatttaatataatatattttttgctattagtttaaattatgtaatagtatatgtatgaagaaaggcaatgtaccagaaaattcatgtaatagtatcattttgtatagtttattccctctatcttataataactatcatgttagaaaaaataaattcccaaataattatcaattattattattttattattttatttgtatcccttattctctatccttacacactgaacaattcccttcactgtcttccattcccttcaattaaaatccttggctgtccaaaacttagacttcgtgcaccacattaactatcctggttttttttatgtatgtattgcaatagaccacttgttttcattttttctgtaacccgtcccacagtacgcacacggcacacttttcttcctcgggtctgtcactgaaactgcaattcaaggcaaatatttgattaattgaaatgcttttcttcctcgggtctgtcactgaaactagtgcaattcaaggcatatatttgattaattgaaatgctattctgagcttttcaggttaatactgatttgcatacgtcacgttaataatgctgtcaatgggaatgattaaacttatttgacacgaaatgtaagtgccgtatagaaagctaattgttcatttaattgtccaataggttacacttgcaggacaaaaacactcaaataaaatctctaaacacctactcgagtccgagtccaaacaaattccatcaagaaaatgacagggaaaaccaaggaggaaaataaataaaaaaacccataaatttaaagtgtcctgtacaaagataataagataaacacttcaacaagatatgccaattacatggccaagttgtgctagtcatgccttccagctgaaacccatgttgtcatcaagatcgctgttaaagaaggggttatccaagaactcattgccaatatcctgagccacgtcttgcaaatgtagattttgttgcatatcagatgttctctggttgaatccattgttgccaccggccgcagaagaatcactatttgaagctgttttgaagctattattccttgaaatgggtctattgtttcctggaacattggcagaacctccgcttaaagatggagtatggcccccaaaacccattgtgttctttgaaatattcccatttgcattatgtccaccaagagactgtgattgcagtcccccattgttatttgacatttcctgcagcagttgctggatcatctgctgctgctgtagagcttgatttccttgggacccctgtgaatgattttgttgaagtaaaccatttgcacttaatgtgcgctgttgaaggagttgttgttgctgctgctgtggggttagatggggacttgggaaaccacctacaggcgagttctgcattgagcctggaattaaagcaggaccagttccttgcaaagcagaagagggactcgggtttgaattattgaaagaggacccttcgcgctgaagtgagccagggctagagttcattgaattttgcctcatgagaagattttggtagttgttcagtgctaaagcagcttgggctgacccactcaaagcaccacgaccaaccatattattagtgttgttcatatggttgttcaatccaggattcagtgtcattagcttgttgagtgtgtttcgatcagttggcagaccttgaacatttgccagctgttccatttcctgcatcttttgcatctggccctttgaggctgttgctagtcgaggataatttttcagactctctgcaggtaaatgttggattaatatacaaagaccattgacaatataaaaatatatttccaaaaaacctaaaattgaaacagattcacacaactaaagattaggagtccaatgggagaaaaagatgacaaaaaatagaattcaatagggtaatatagtcataaaaaccacaagcaaattaccaattgcaccaattttgtgctccgaacagatatctattaggtctttcatgctattgacaacctccgaaatctgtcaaccatcgtagcaggcaactataaggttagagaaaatatatagaataaaaaatgaatagttttctctatggtaaataccactcaacactcaacataaacttcgaactcaaacttaacagcatacctgcaaacatctcacgtatcttttagaaaagcccaaatcattcagtgattgcaactccaaaatctttgcaagctggcgccctgctgtcaataccctggtgcagaataaacattattttaagctgggtccagtgtcgttttaattgttaacttgaactatgctcatcccaccaaacaaatcaataaatatatgtaacacaatatacttttcttattaattgaactagtaaatgtaacacagactgttttaaccagataattttttaccaaacaacttataaaaggcccaactagagagtgtggttaacaaaagggaagcagaatctcaaaaatctactctatattaaagatgccgtgagacgctcatagtcttgaataatctccttgtcaaaatttgtctgcataacttgaaacatctctatatattttttttttaaaaaagggcaccagaatataagcaaatatgccaacagaggaaaatcttatattacaataagatctctctgtttctgttttttggttattgacttacaataaggttctacatttcgattaccaaattgtgttcaaaaaagctaataataaaaatgcttaataacattttattgaagtagtttttggtgttaaaagtaattacaacacaaaacatgttcaagcccaaacgagccccaatcaccttatcactaacagcatttgcaagccccccccccccaaaattcattttatcatttattagtgagagagcgggcttagataaacggtaaaagcgcgttaagacggaagaaaagaaaactggaaagtaaccgaaataaggggagaagaccacaaaacaagannnnnnnnnnnnnnnnnnnnnnnnnnnnnnnnnnnnnnnnnnnnnnnnnnnnnnnnnnnnnnnnnnnnnnnnnnnnnnnnnnnnnnnnnnnnnnnnnnnncccaatgcaagaaaacgaaaacacacagagaatctaaaaaatatgaagaaatatagtttgcatcatatccttctggagttgtttctccatctatctagccaaaatacagtatgcaccatttcaagatagcaggcatcatataaggtgtgcagtaaagagaaatatctcagctaaggaggatttactaaatacaccaatcattaaagaacaacaatgtattaacttacatgttgctgtttgtttgtaagtcttgctgagaaaccccatcagccccactttcagcaattgtactctggcatttttgagctacctgaactaattggttgacctgaaacattgtaaatcatctgaattagcttccaaatcaacctctatattgccataccaatcaactttacttcggagaggtgtgcattttttcatgccttgcctctgacgcattcaaaccccctagtgccttatgggtaccattcacctttaatttccgtgatctacacttcataaaataagaaaggaagtttcaccagtgcctaccaatttttgtacccaaatgtccatatactgttgccattcaccaattttcatttgcacatacagtcacgagaaatatgatagaagaataaaagcatacaaggagttaattatacaatcatgtacacatgcagaattttttctacagaaatattcagaacatgcaaagtggaccactccagggtaatcccaacttgattaaaaccaggcaataaacgaagatctacttcaaagaaatattctaccaaatagcaccatcatctattcaaaacaaagagtggctgcaaaagtgaaaagcattctaaagaatgcagaatcatacctgtggtgcaaccaaccttcgaggaagaagttcttcgtggcgtcttgcacagaactcccaagataagatctgtgcatatcaacaagaatttcaggaggtcattataaaaaagattcaactagaaaatacatttaactgtaataacaattttgtaaccttcaagtcttgagtgaatatgatgcgaagttgaccttcacgaacaacacgaagctgctcatatacactctcttgaattgcttttgcatattccaacatcatcacaccagaaggaaatcttgtttcacgaggcaagtccagaaacaaaagttcatcaatcactccacttccaaatttgatttcattaagcctaggtaacacttcataagttgcctctgtacacaatgcacaatggacatagtattagttacaagatttacataaaaaatttaaagaaataacatgctaatcatctaccttacaggcacatccaatgcacaaattatgcatcttcagttaagaatcactcagttatttgacttgcttattattgatcgcatttagctcaagtttgttttgttctgtctaactttcaagtttaaaactaagttacaattaagaatgtggtcgctggccagttcacagggtacttataagccagaaagttaaacacatattggaattttacaatgaaactaaattctcacattaacatattatagaataacaacacaatggccactttggtttggttcaataaagcagtttccattttcatttgttttcaaaatattcacaaatatgtcactttgttttcactctgtttcctatttttagaaatttgaataggaaatagcgaaaacagcaaatctccagtttatagtttcttaaacaaatctttgaaaacaggaaacaaagtaaaatttttgtaattattatgagaacagtgaatgaagatataaaaaggttttctcaaaccatataggactaaatatttaaatttccaatatacttaccaaatccccttccagatttagaaccacacatgtcacattgccatgcatcctgaacaaagaaatatcaatgtcaatttatgtattcatcaaagattcactagcactaagattaaaaaagcaaactggtgtagacctaaaatagaaaataaaataaatgcaataatttcagacataactttggtatagaggcatttttaagagttgttaacaattacatgataagctaatgcaatcgattaacattttgaatgcaagattgaacaattgactattagcaaatattaaggcatcaccctatttatgaagcaagaaaaacaaggataaatgagaagtgcaaaaacttaccatagctgcttgggggaaaacaccaagtgcatgatgcccaacattgctatataatgacaagcaccaccgtttctttgcacgaggagagtaatattcagcaacaaattttctccaataggcaatactattatcctgaagcaaacaaaaaattcaacagcagagttgtaactaatctagaacttcaaaaatactcaacacatacaaatgtgttcagatataccatgttcctgaaaccaaaggagtaatcttgaaaaagaaaacaaaaatgaactgataatataatgaatctcaaatagatttaaatagatttaacactaagcacatgcagcaaataaacagaactcacatttggcctttgcctttgatgatagagatactgcatcaatcgacgggcacataccccactaacaccactgtcatatggacgcttgccagcagaagagggctgcatcacttgttgctgtaattgctgcctcaattgcatttgttgttgttgatgctgttgttgttgttgctgttgctgctgctgttgcaagtgcgctcgctgtaattgtggcattgactgaaagatttgttgttgtctcagtctctgctgctgctgaagcaaagcctgtaactggggattacgaccctggaattgcatggaatcttgtctctgaagaatctgttgtataacctgctgctgcattacatcttcctgtttgatatccattctaggtttctttgacagatgagacatattatttggatcttgaatgaaagatcctgggacttgtgcacccatttggaggggagacagaccagtctgcgatgcaggcaaagatgtagcacttgaagcaccctgcggctgctgctgattctgctgcaattgttgaacattctgatcttggtgagagctctgttgtaccacagaggaaccatccatcaccgatgagccagaaatacttatattattcgatgtaaatgacataggagaggcaggtaatcgtaagtatgagtctgtgttaacactggcacttctctgcaaatgggggccaccagagagagcagaatttgcatccgtgactaaagaactggctccaacacttggtgctgagtttggcacactgttcaaaactgcattattcatacccccagaaaccggacccaagtttgaacgaccggctcctggaaccgtgctagacgagttaacaaaagatgagcttaagtcagagttaactacattctgtgactgcccatctccttgaaagaaaattccagaatgcgaagatgattgggctaaccctcctgccacccgagaaggtgtcatggggggcatccccccttggttggaatctaagtagctctccagagccaaacctaactggtactttaaatattctcaaatagctcatgaactctacgtaacagacagattgcgtgtcaacccctgatcgtatttcttctatctcttcttaaatgtccaagcttcactctatcacacaaccttctatcaaatccacaaactcctgttcaatcataatgcacccaaaattgttatttccttctcaacaccggacaattgctgatatgaatctaagtaatctaacaacaacaacaaagaacaaaacatatatacatattcatcagcacaaggaaaactccagctaaaactaataaaaattaaatcagcaaacaaacacgtctgcaaattgaccaacacctcaatacccttatccaggaaggaaaaccacaacccaacaatttaacacaccaaattctaattctaacagttttacctcctcttaagagagaatttcacttcaaagagaaaagtaaggtaacagttaacactataatgccagtgacaaaacattaagatgtctaaatccactccctttattttctcatgaaagctataactactcacttttccatttaaagtgaatcaaaacccaaatccaatgatctccacgaaaaggatcaacattttagggataaaaaaaatccgaagctctgaattgacacattcaaaacccaaaatcaaattttaaaacctaacaaaggaactgagaaaaacaaacaagagccccaaattccattcccggcatgcacaacaattcagaatcataaaaaactactaagtaatacgagaatgtcccaactcgcatcaccaaacaacgggaaaacgcgaaccttaaacataacaccacgaaaattgaaaagacaaaaaacgaaagaaaaaaaaagtaaattgtgcacaattctctaaaaataaattaagataaaaaaaactaaaggattcgagatcgatcagtagcgaataacctcccaatgaagctcgcaaaacagttcagagccaaaacgaatcgtttagagctactctgcgagctgcaaaaaaagcgaagcgtgtaatgaattgaaatcatagagaagaaaaaagaaaagaaaatgtgagagaagagagtggtgttttataacagtgtgtggtgaccgcttttacctgccacgcgctatcgcgttacctgcagtggccggtcacgactgagacacgcgccgcgaaagtgattgtggaacttagtcggtgagtgatagatccgcagacgcttggagaccacattgatgacgtggcgacttttcattggcctaaagttttaagcacgagagaaactgtgggtaggtaatattcgctcttcccgcaacatccataactccaatgtatttttccagtgtaaaagtccttcaatgtcttatcttacaattttttggggcgtggtatatttttttttttatttttgtttttaatttttttaaggagaaatcaaaatgttaacaagaagacttacaatataaatattgtaaactaatcaacattgaatggtagaataaaattttgcgggaatatttatatttaaaatatttgcttctaacgacaaatgaattactcttttttttttttttgaggaaatgacttacttttaggtacaccaaataaatgaattgttcttatctagaatttgtgtgtaacttaaatattaactaattaaactttaaataattattatcgctaaaaattattacattaaaaatttgtgtggcattatactataaaaacttactgatatgtttagaatttattaataaaatcatcctccttaaattaaaaatatttcaattttgttcatgtaaaatttttgggagaaatcaaatgttaaccatggcactcacaatataaattttgcggcacatatttatattaaaaacatttgcttctaaagacaaatgaattactcttatgtacaccaaataaatgaattgctcttatctagaatttgtatgcaattaaaaaataattattatatagagagggaataaagtataatttaaataatacattaactagagtctaattgtacatagcccaccttgagagtgggggtcaatttaattgtatcccgagagtgaagaaagtgtaccttacttttattcaccttcaacagtaactcgctaaagtacaaagattgttgatttaatttatttattgtcagtgtgaatctcaatcctggaagtcttcgtaagttgaatttcaattcattttaattatttgctctttctaatttaaattctaaacctgcagttttctcatctcaattcttattttactttttaattctcactttaatcccattaaaattagcaacaattacgtagctaaatgcacgatccttgtcaaaataacaatttattacttaatgacacccgtacacttgcaatttgtgtcactaaattatatattactgctattatgtaacaagttaacttgtaacaaaaaaaattaacaacttaactcattagaactattattaaaaaaactttacacaaaagtaatttaaatgcataatagaaattagtttccattggggagttaattgacataagggatgtcaatcttattaaacatcggaaactagtttcgtatttttttaccaaaaaaaagggctaagtggacagataaaaaaaaaaagtgtaacaagttaagaaatctgttctggtaaaaattgattaaataagcaacaaaaataggatttaagttaagaaatcaagatgagtggtaacattgaaataaaaattagtaagcatttacaatgtaacaggttaagataaatagcccaaattaagatgtcacattatatgtaagcttaatacgaggcaaatattccaatgtgcctatttggaacgctgcgagtgctatcaatggtatttgatttaaacttgccacgaaatgtgagtgccgtataataaactaactgttcattaaattgtccaatagattacacttgcaggacaaaaaccctcaaataaaatctctaaaaacctactcgagtccgagtccgagtccaaacaaattccatcaagaaaataacagggaaaaacaaggaaaaaaacagcatctatttaaagtgtcctgtacaaagataataagataaacacttcatcaacacatgatatgccgatttcatgtccaagattgtgttagtcatgccttccagccaaaacccatgttatcatcaagatcactgttaaggaagggattatccgtgaattcattgccaatatcctgaaccacatcttgcaaatgtagattttgtggcatctcagatgttctctggtttaatccattgttgccaccagcagcagaagaatcactatttgcagttgttttgaagctattattccttgacataggtccattgtttcctgtaacattggcagaacctccacttaaggatggataatggcccccaaaccccagtgcattctttgccatatttgcactgggtccaccaagagactgtggttgcactcccccgttgttatttgacatctcctgcagtagttgatggatcatctgctgctgcagagcttgatttccttgggaaccctgtgaatgattttgttgcagtaaagcatttgcacttaatgagggctgttgtaggtggtgttgctgctgctgtgggggtagacgggggcttgggaaaccactaacagatgaattctgcattgggcctggaattaaagcaggaccagctccttgcaaagctgaagatggactctggtttgaattattgaaagaggacccttcgcgctgaagtgagccagggctagagttcattgaattttgcctcatgagaagattttggtagttgttcagtgctaaagcagcttgggctgacccactcaaagcaccacgattaaccatattatgagggttgtttatatggttgttcaatccaggattcagtgccattagcttattgagtgtgtttcgatcagttggcagaccttgaacatttgctagctgttccatttcctgcatcttctgcatctggacctttgaggctgttgctagacgaggaaaatttttcaaactctctgcagtaaatgttggatcaatatacaaagaccattgacaatatacaaatttatttccaaaaaatctaaaattgaaacagcttcatacaactaaagattaggagtccaatgagagagaaagataaaaattagaactcaatcgggtatagtcataaaaaccacaagcaaaattaccaatggcaccaattttgtgatctgcacagatatctattaggtctttcatgctattgacaacctccgaaatctgtaaaccattggagtaggcaactattagaagccttaatagaataagaaatgaataattttctctatactactcaacactcaacagaaacttcgaagtttgaagtagaatttaacaacatacttgcaaacatctcacgtatcttttagaaaagcccaactcatttagcgattgcatctccaaaatcttcgcaagctgacccccagctgtcaacaacctgatgcaaaataaacattatttgaagcccgagtcagtctcaccccaccaaacaaatagataaatacatttaacagaataaatgtacttttccttattaattgaactagtaaatgtaacacagactgttttaatcagatactttttcaaccaaagcaagcttatagaatgcccaactaggagatatggttataaagtttagacaaaagagaagaatctcaaattataatccatatttaaaatgcagtgagatgctctaatcttgaataacctccttgtcaaaatttgattgcatgacttaaacatctgtatgtgctaaaaatgttaatttagaggaccaccagaatgcaagcaaatgtgccaacaaaggaaaatcttatactactataagatcattttgtttccaatttttgttattgacttgcaataacttgtattttatctcatttttagcatggttccatttctccttttctgtgttataattaccatattgtgttagaaaatctaattaatgttcaataacatttactgaagttgtcttttgtgtaaaaagtaaaataaaacatgtaaagcccaaaagggcctgcatcactttatctctaacaacttttgcaccaacaccacaccccaacaaaaaagaaaagataacatagagaatccgataaatatgtagaaactatatagtttgcatcatcttattctttctggagttgtttctccatctagccaaaaaacagggtgcaccattccaagattacatcatcccaaggcatgcaatcaagagaaatatatcatcagagaaggcagatttagtaaacacacagttgttgaggaataacaatcttacatgttgctgtttgtttggatgtcttgttgagaaaccccatcagaaccactttcagcaattgtactttgacattttttagctacctgaactaactggttgacctgcaaatgtgagaatcatgaattagcttccaaaacaatatctctagtattgctacaaggattaagtaaatataaatttggaattgcactatctctatcagtgtaattagaggtgctgaaatgaggcaatgcaacagaaggagctggtggctcttggtgtttcaggtgagaatcagtttagagggcacaattctagctcttcataattctctggtttaggagaggttccctttcaatccttttagttcattttccaagactatcattaatagctaacaggttttggcgttcacctttacttttcttgatctccaccttaataagaaagaaagtttcactgatgcataccaatttccacacccaaatgtccatattactacttgtcaccattcggcagtattcaattgtgcatacaatcacaagaaatacgatggaagaatacatgcatgcaaggagtcaattatacaacaatgtgcacatgcagaatttccgacggaaatatgctgaagatacaaagtagacaactccaggttagtcccaacttttgattaaaaccaggcaataaataaggatctacttcacagaaatattctaccaaatagccccatcatctattcaaaacaaagagtggctgcagaagtgaaaagcattcaagaatgcagaatcatacctgtggtgcaaccaaccttcgaggaagaagttcctcatggcaccttgcacagaactcccaagataatatctgtgcaaattaacaggaattcaaggtcattatatagaaaatgttcaaatggaaaatatatttaacaaataacaattttgtaaccttcaagtcttgagtgaatatgatacgaagttgaccttcacgaacaacacgaagctgctcatatacactctcttgaactgcttttccatattctaacatcatcgcaccagaagcgaatctcatttcacgtggcatgtccagaaacaatagttcatcaattactccactgccaaatttgatttcattaagtctaggtaatacttcataagttgcctctgcaaatgaaacccagaacagacatattattagattacgagatttacatcatcagaaacttaaaagaaataacatgttaatgatctagtttacaggtaaatgcagtatacaaattgtacatttaccactattgcccactaaaaaacactcagttacaagatttactaattattggccacattcgtttctgtaagtttcgtcaaacttttaggtttaaactaaagctacaattcagaaaatgataactagcagtagtcagcaccataataggataacaacataagggccagcatggtttgataaagcactttctgatttcaaatctttttttcaaaaatgattaaaaaaatatcattgtttcactccatttcctaattttaaaagcataggaaatagtgaaaacaacaaaaatcctataaattggttttatatacaaatctttgaaaacaaaaaataaagtaaagacaagatgacatattattgtaatttgggagaacaggaagtgaaaatagagaaagtccacactcctcaaaccatatatgcgggataggcctcaatattttcatatacttaccaaatccccttccagatttagaaccacatatgtcacagtgccatgcatcctgaacaaagtactatccatgtcagtatgcattcatcaaagattgaagtgcactaacaaattagaagggcaaaatagtgcattcctaaaatagaaaacaaaacaaatgcaattaccttagatataactattgtatagaggcattattaggagttgtcaacaattacatgtaagctaatgcaatctattaacattttgaatgcgcaattgatcattagcaattatgaaggcatcatctgatttattaagcaagaaatgcaacaataatttgataaataactagttttaccatagatgcttggggaaaaacaccaagtgcgtgatgcccaacattactatataatgacaagcaccaccgtttctttgcacgaggagagtaatattcagccacaaattttctccaataggcaatactattatcctgaagcaaaaagaaaaattgaataatagttgtaactaatcaagaacttcaaaagtagccaaaatataaaacaagtgtgttcagatataacataataaactattttcctgaaataaaaggactactcttaacaaaaaataaaaacaaaaggatgatatagtgaatctcaataagcagatgcagcaattaaaccgaactcacatttggtcgttgcctttgatgatagagatactgcatcaatcgacgggcacataccccactaacactactgtcatatggacgcttgaccacagaagagggctgcatcacttgctgttgctgttgttgttgttgttgttgttgttgttgttgttgttgttgttgttgttgttgttgttgttgctgctgctgctgctgctgcctcaattgcatttgttgttgttgttgctgctgctgcaagtgtgctcggtgtaattgtggcatttgctgaaacatttgttgttgtctcagtctctgctgctgctgctgaaggaaagcctgtaactggggattacgaccctggaattgcatggaatcttgtctctgaagaatctgttgtataacctgctgctgcatcatatcttcctgtttgatatccattctaggtttctttgacagatgagacatattatttggatcttgaatgaaagatcctgggatttgtgcacccatttggagcatagaagggccagtttgagatgcagacaaagacatagcacttgaagcaccctgtggctgctgctgattctgctgcaattgttgaacattctgatcttgatgagagctctgttgtactacagaggaaacatccatcactgatgatccagaaatactgatattatttgatgtaaatgacataggtgaggcaggtaatcgtaagtatgagtctgtgttaacgctggcacttctctgcaaatgtgggccaccagagagtgcagaatttgcatctgtaactaaagagctggctcctacacttggtgctgagtttgccacactgttcaaaactgcattattcatatccccagaaaccggacccaggtttgaacgagaagctccagaaaccgtgctagacgagttaacaaaagatgagcttaagtgagagttaactacattctgtgactgcccatctccttgatagaaaattccagaatttgatgatgattgggttaatccacctgccactcgcaaaggtgtcatagggggcagcccccttggtgactggaatctatgtaactgaccagagcctgacacaactggtacttcaaatattcttaaattgcttgagaactccacgtaacagacagattgagtatcaacccctgatagtatttcttctcttttttaaatctgagtttcactctaccacacaatcttttacaaatccacaaactcctgtttcaaccaaatgcacccagaattgttattttcttctcaacactggacaattgccgatatagatctaacaacaaagaaaaaaagacatacacatattcatcagcacaaggaaaattcttaaaatccagctaaaactaataaaattaaatgaccaaataaactcttgaatagcatcattttttttttaaaaaaaaaagcagccacaaatggaataatttcccaatacccttttccaggaaagaaaatcccaatccaacaatttcatgaaccgaaacctaattctaacggctttacctcctctaaagagtggaatttgcttcaaagagaaaagtaaggtaagattgtaatatagtgcatgccaatgacaaacaatgaggatgcataaagtaaatcagaacccaaatcaaattctaattaacattaggacagtggtctccatgaaaagatggataatacaaaatcagagaaaaacaaaaacaaaatccaaagctctcaattcacacgttcaaaaacccaaaacccaaaacccaaaaatcaaatagcaagacctaaaaaagaaaccgcatggaaagagagaaaaaataacccaaattgcaccaaaattcaaaagggcattgcggtttgttaccaacgaaaaaacgcacgaaaaacgcgaaaagtgacgtggaatcatgacattctaaaaaaataacaagtattaataaaaaaaaaaagaaaaagaaaggatcagatttggcaggaaccacgctggtgcgatttttgacgaagatttattcgtaagaattagcatttttcgaattcagaatacccaaaaaccagaaactcccatctcgcatccccaaacaacggaaaacgaaaaccttaaacccaacacagcaaaaattgaaagaaagaaacaaaaaagattaaaaggaaagcaaacaaattacaactctaaataggaatttaattaaaacatataaattaaagggttcagttcaagatggatgagtaggttaaaaaaaattgaaaacccttgaatgaaccgttcagtggcaaaaacgattcgtttaggaactactcacatagaaaccgcagagctgaaaaaagaaagcgaagcgtcgcttttcggaattagggaactcgcagagaataaaaaaaggaaaggagtgagaagagtttattaatatcagagtggggagtgaccggttcaaccggtcacgggctatcaggttacctgcagtggccagtgaatccaaactccatccgacatgtgaacacccgtgtccaacaactcatagttggggttctatccacccaagtgtttctcacacacaaactctgcttgctttggcaaacgttagccagacacaaacatgaacatagtctgtttcaaaccctgcattccttcctcattactatgccccagaaccagcttcagaaaattcccactaacaattccacgtttcagtcttcaagattctcagcagcagcagcagcaacaacaacaacaacaactcaacctctccgttcttcgcttcacattgggtctctctctcctctctctctcaagagaataaataactaatcttacttaaccaactgtaggtaaatgcatggttaaaataaaatcaattttaatcagtttgttatgacacttagaggaatcaattttagttatccaaccataataactaatttttcttatccatatatataatattatactttgtgtgaattggtgattttggctttggtgcagggattccagggttggatgagtcttacttgcccagatggattggttatggctttggttcacttctgctcttgaatcactttcttgggtctgactcagccactgttacaccggctcagcttgtaagaaaatttgaagattgaaactgaactgcatttttgttttatatttttctttttttgtttggttaagtttgtttacttttctggggtgtgtttcagttgtgtttttccttgttgtgtagagtacagaggttttgggtctgtctttggcttccttctcgattgtgctgccttaccttggtaaatttctcaaggtaattaactagctttgtccatgtagaattaattcaacgtttctaccctgaataaaattaataatttcagttagacttggagatatatacaacaacgccttatcccactaggtggggtcggctacatggatcaacttccgccataatgttctatcaagtaccatacttctatccaaatcattaagttcgagatccttttttataacctctcttatagtctttttgggtcttcctctgtctcgaattgtttgccttctctccatctggtctactctcctcactacagagtctaccggtcttctctctacatgcccaaaccacctaagtctattttccaccatcttctctacaataggcgctactccaaccctctctctaatagcttcatttctaattttatcctgtcgagtcttaccacacatctaccgcaacatcctcatctccgctacacctactttattctcatgttggctcttaactgcccaacattctgttccgtacaatatcgccggtcttaccgcagtccgataaaactttccctttagcttgatcggtacctttgcatcacataacacccccgatgcttttctccatttcatccatcctgcttgaatgcgatgattcacatccccttcaatttctccatcatcctgtattacagacccaagatatttaaaccgtgtgacttgagggataatatggtctcctattttcacctctgagttttttccctccatagacttggagatatatatggagggaaaaaacttagatccagttctataagtattgtttgtgttgttttccggtggtttgaattgagtttcacatcggtaacaaaagtttgcatttaaggattatgaagattacggaagtgaaactccaattttgattagagattaatccaatcaacacctaagaaaccgtgtttaagtttcgtcctatttgggctccataaattcatcagccttccagtttcaagaagactactctttttcttttttcctttttgatatgtataacaattaaataactctactttttttttcacggtttaaattgtggttgtgtctgcaattttgtcataatccttaatattgctgaaaattgcagacaaatgtggccaatgtatgtagctgcaattgtggttgcagaggtgtgaaaaaccttgatgctgttgctgcaattgtagttatgtactgatttttaaaaccttgcttttgtatgtaagtaaatataaatatatatagagctcaaatatgaattttttcatttaagatattgatcctcaacccaaactgggaaactgttagggtgctcaaccagtggatgaaaagactataccggatggtacagagcaaatatttgtcatgtcaacagatagagtggatggcctgaaggaggacctggcttgggcatcatatgttctgttgtgcaatacaaatgccatagctatggtatgtcttgtatattatcattattaatttaaagaaactcatggtaggttgattgctgttggggtttttcatttgtaggttacctttaaataccacttttattgtgaatgaaaaaccaaaaacatatgataggtttaccctaaaatgaagaaaaggaaaaagccaaaaggggcaatgatatggatggttgtgatcatacaataatatttgttgtgttgatttgaactatatttgtttaaggtgaaagttcgaaattactagttcaaaaggtaaacttgtcaagtaatcaatgtgtaaattgcttgtcatttctgctagagtatatggattactcagcctgctgagctgacagaggttattaggactgattagatttgtcagaagttagctacccatacagttagatgtttacattgtagataaaggttatcatgtaaaatatacatagcaaactcgatgttctttcatcagttcaatccagagttactattcattttctccatcttgctctctttctttctgctgttaagcatttattcttctaccttattcttgcacaattttcaatctgttcagctaatttttattcaaggagaaatatgtgcaaggggatactggaacataccggatgatacatcaaaagaaattcttcctggttggtttaagaaaaaaattgaaaatgctggcctatatgatttgaaagacaccctatattttcctcaagatgcaggtattgataatattttttaagttttggttaagtaagtatatggaagctgaattatgaaagtagctggtttttccagttaattgctaggagctagaaaagcatctgcacattcagttgattttttttaattgtctagaactagaatatatgcccaattaaaatcttaaactaaaacgtggttgaaaaaatgtttttacctaaggttatatcccacaacaactctgtctggaacaaacatgttattttatgaagtgtttcctttatcttgaaaggtatttgaccaaattgaaaattatgatcatgaagcctatgcctatccaacctttgctcattgacttgaaaaggatagctgattttatttcaaatacacagtaatgctgtatcgtaatattttttatgcctctggttggatggagtatatatatgctaaagttctattttgtgcttcagcttttttcctgactttccccttctttccctacttactgattcaacaaaaaaaatcaggaactggaaatatttataaagatgtagaacgccatatggaaactgccacataaattgtagatcttttagactcttattaggagatatgtgcattgttgtgttttgttatttactaaacatttacgactcttacaaaaatctttactatgtatttctgtacaagggtctttagctgactgagtcgagtctaagaaaaaacttattactcaactgaatataaggctttaatttttttgactgaaaatataaggctgcaattaataatattagcaatgaatttcttattttattaaatgaatccttactggcatgaatttcttactttattaaatgaatccttactggcatgaatttcttactttattaaatgaatccttactggcatgaatttcacttcatgtttaacattgtatggttctgtacttttgttcaaaaatctgaaagtttgatgaatgcttcagattctgaatttcaggatctggtacctatagggactcgctgtcttctaatccaaccagtgttacaagtttctaatgaaagtgatactggcttgcaaaaacctgggggattcattctgctggcctcaactacaagatatgcatttagcaataaagacaaagcctggattgcagccgtggcaaacaaatttagaggtaatagcattagcatgtttgaagatttgtagaagagtttacacttcatttttaataaacaagtctggatttcataggaggcctttttcttcctatttagatgtatgactgtcatgtagctttattgttggtatagctaatggattttttttatgctcatgtgaaactgaaataggtggcctatagcatatttacaaccttctatgaaaatgattctaagcatttgaatatttcataagatgtgtttttcaattgtatcatttagttgatttgtagatttcaagatataaaggaaatactatgaaaatattggtttgtttacaactcattgtcttatatcttaatttatatatgcttgagaattgagttgaagttccatgagctgtaaatctatttagcatataggtattctctccacccacctaatgtgtttcttttattgataatattttgcaattaataagcaaagccttctgtttatcaaagattacaagcgacataaccgtaaatctaattcaatgatgagaataaaaaattaaagagacaaagaacattcttcgtggtttggtgtctatttggattatgtgaaacaaggttgtgttgcagggtattcttttttactctaatggtgttttggacttgatataagttagatctttggcttggtataagtccaaaaagggtagggctcattgtttttttctgattggtgtatagatcctttagctcgtctctatctgtcaattctataaaacctggtgaaatcattgaatacaggttggagtacctcttgcaatctattttctaataaagctttgcacacacatatatatatatataatgaaaaacagaaaaagaacatttatttggttgataccttttaggccatatcatatgtttgtacaatctttactattggaaggatttgaatacctcaatcaatttgtttttagcacggttatgatcatgtatggttatgagaaagctttacttggtttagaaaattgaaccatatatgttatacaattccatatacaggaaaggtttaaccatctgattacctactgcaatgcaagagtatctggagtacaaagaaaatgaagcatgaaatctatgtgatacagggcaatggattgcataggatttaacagctcaaaatccggattttctcggttaaattaagggaagaaattagaaaatgaagactcgtgtggaatatgtgatggcgaggttgatttgcaagaattaggatgtggatggtcgtcagtggcagtttttgtgttatgaacagtacttgtgaattttggaaaagtgggtgcattgaatcaataattatggaaaagtcggcgcattgaatcaaaggaggcatctcaaatttgaaaaattaacattatgcatatatataacttggtcttcctgttgtagttatcttgttaatgatataagaaatttgggttagccatgttctagttttttttgtccgagtcccatactagctactctatactcttatcaccatatcaacaaaatgctccatgatgcatgagctctgagttctatttgtatatacgaaataatcattcatgaatttcattggatcattgttgatttgtctaatgaactttcattcatgctagcaactcttttgtcacttttccattgagcgtacttttagggtggcctgatgggtttccaaacgtagctttaagtgtatgtttagatctttaatgcagattgtcacctctccatgtctataagaaatagcttcagcatgtgttatgtggacatgttgatgtgatatctatagtagatgtgtgaggatgttattccacacaggcacgactattttggttattgtaatgaatgttgtaggggaattgctattggtccttacaatcctcaaaattccaagatatcattctctgaaaagttaacatcgtgttttcacttcacaaaaggaggtataaattttttcacaacggaatcacagaatacacacaatagaatcttgattcctttgtaaagggggtgttaaaacatgacaatactataaaagtgtgattcttttttgattttatttttaaaaaaagaaatttacaatgaattcacacttttgtttagtatctttttttataaaaaaaatatacaacaaaaatgtgaaatattgcatagtagaatcatgattttattgtaacaaaatgaaattgtaattctaccaaaaaaaaaaatgactgtgtgagtgcaagtggggtagagaaggatagtttagtaattatgcttgattgataggagtcaagaacaattttgttggggtcaataataacacacatgtaaacaaataggttaaatgtaaaaaaaaaaaaacagaaaaaaaaacgtaacttatgcctattgataaggttaggattcaaatttatgatcatctcactagttactactccgacatcacatatttttccattcttgttggtgaatcacatatttttccatctaatgaaactcttcagggtttcgttgcagcaatattgttcctatggatagtgttggtgcaacagacaacactaaaattaattaaaagccacaaaagaacagcaggtttaggagcaagtttcatccgaaaatcttcaaccataactacattgaccagaaactattaaagagaaagcagaaataagttataacaacagggaaactttttaatgtctctcatcttgtggtcatcatcttggcctactagctactaacttatgattcagaccattcaagtaacgcgtttttcatgccaaattctgttgtctatttaagaatgaatcattatttaacaagatagcagtatgatgtacgtcacactaacattatcttattttattgaagtcagaagtctgacattaaatatgcctttcataggttatttaagtatacatcctattttcttacgtgcctgagatggaccaagctgacttgtctgaggtgaattgttcattggaactgaactctgatgaatgttggataaataagactcttgagtggattgaggtatgagatcttctgaattttgtgagttctctagctaggctaagactatgaaaaaggatgaatactcatgaaaaacacttcgacacttatgttagtaaagattcaacacaaatataatatatgttagggtgcatgtgtaatgaaattataaaaattaggagaaatttgtatagaagttcaactatgaggagaggtgaatgtaataagtgcaaaacacaacaaagatgtgtgtaatttgctcttatatataatacattagatgtcctgtaagtgaatattgacttcagtgaacacttgtaatttgggttgaggtgactcactatacgaattggatctcaagcccggtctaaaagcatttttcttttaatatgaaatagtaattttctctctttttaaagctaatctataaatctattgctaatttaattggtaaaagtattatattacggatacaattacctcaacataaaacatcatatataagtattgattcaatgatatgatccattataatgtcatctgcacaagaatcccacttaaaaaaacatttgtatttttcttgtaataaaacaaattgcgctctaagtaatatttctctcaccaataattcatataagcattttaatatatatatatatatatatatatatatatatatatatatatatatatatatatatatatattctcggtgatttttatactaactgatttaaatattttctgtatcaattatttgtttagaaaaataccttcaataatgagtcatttttctgaatttaataaatagtgagtgaaatatattagtgtcttcaactcttcaagagtctaactttatcttgtatgaagagtattttgaaaatcttaattattcacatgcatagccaataaaaattgaaaacgaatatattaatagagagaaagattaaaagaattaaaactgataaaaatatttaaaaaaagaatactagcatatctcattaatgttagaaaaaaaattataaaaaaaatattaatatgagataaatttaatgttactaaataaataaattatttttttagtcttgataaactaattaattgaatcttataaaataacaaattttgccaactaattaaagttgctatggtgacaagtcccaacttgtcatgaattaaggaggggtcagtgaaatcataaaatcaattacaactgttgccttggactgctgaattgcgccattcaaagacacaatggatgacagcagatgtgattaaataattctaagtttgttaccacttcacattaactgatatagataacccaaaaccatacatagtaagcaatattcattattggcatttcttgggggaccctcaggtcacagtcacagacctagtagaattcaatcttatttaaagattaaagacaacttgaagaagttggtttggctttattgcatcagaagagaaactcaaagcaaaacaccttggccaaatttagattagcttctaactcatgacagctttacaattgtataatcttactactaagacaagaatgttcaactttgtaagatttgtaattacgtgtttggatttccattcacacaatttaaacgtggatcacagaagcaatttttaattgcttttggtacatcttaacaggaaaatttgatcatccgtggaccacagatgctaatccaaacaggtactaagtgtttacaaaaaagttagaccagagattctggaaaagttgatatgcatgagtcaattttaatttatgcgaaagatttggtttattatgttgctttaatttattttaattttctcatcaataagtgtttgttaagaaatgtatacaaattgcttctaccatctgccttcattcctctggcattaaattaacctcaaccacaagctacacccctatttcattggctgcttcatttattgctatcagtttcccaaagggatgcagaatgcatggagcacatttgttagcattgaatcaaagcaaaatactattgaaaatgcagcatatatcatgttaagcaggaaccgaaattcttggacattttgagaattcaagtcttctgccccaagagaagatcctatttttacgcgaccatgtagagcatatgccccctctcccctctttgtttttaaggaaggacttttcattgattgatagagtagaactttataggtggggattttgtgccagtgattcagacaaaatgtttggcaggcttgccttgaagcagatgccaagtggtccatgtgtgatatcaaatgtgagtagtcaaatatcaatatatgtcacactagacttggccagaaataaagaacaaaaacggccaaaaatactaaacatgagatattgaatgggaaaaaaacaaaaataattcaaagttctgctcaatttggcaccccctaagataaagtatatattttgctgaatgcaagtaaagacattgtatttcacaaacttgtcatgatttgtttatgggtcaacttagagtatttcctcaaattactaagatttatttaagagattaaaatctcaataaatattttttatacacatagacttaagtttagatcaatttcttaagaccctaactacatgctttaagagatcactatctcaaagataaaattatctatcaatcatataatatatcatgttaatacatatcatgatttcttaacacagttaacttgaatatatttaatatttgaatggttacaatttgaactaattcaacaaatggtttttcatatatacgggcatgagatcaaatctctcatcatatatttaagagacatgattatttgtcaatcatattacaccatattgatatttgtcatgatttgtgaataagagtcacttgaacacacttaacatttgaatttgaaactgattcaaaagttgggcagcgtgatttccaaacttggtcattggcaaattgttacatgcttcaacaattggaaacatcatcttatttagcaagtctaaagggaatgttcttacacgttactcatatgatggccattggaaacaccatttcatttccattttccaacattggtaaccaaacacgaagggagggctcaccgatgtttttgtgcactctttgagtggaaatccagtttctcaaagatcccaggtttctgttcttttggtgggtcttcgagatccttctatcttacctacatacgttgtgttgcatgtgataaaaaaaatagcactagtgtttattttggtcttccaaagatgtatataacattacgttacacatgcttggaaattattaaaaacgggaaataactaatatcttttttaagaattctttcagctagggggttgcaaaataaataaaaaaggaaagaaaattatggggtgatcaattgtcaatagcaaataatataccaatatggaatgcatatttgatcttatgataggatgaatcaatcatgaaaatcgaaattggagttaaacttcgtgcaagaaacttaatacctatgcttttccaacttcatgcacaaagtattggaaaagaaagaatgaaagtattttcatcaattgaaaagtgcatagaaaatagtcttaatttcatatacaataaggacgagtcttacagtttttgctaacaagattttttgaaagatatcttcattcctctcgagctttgagatttcattgacaaaaattttgaaaccctctaaaaatgttcataccttttcttttgcatttcaaagagcttagaatttacatggatctatttttgcatttgcgtctagccaaggcaaatataagcagtttcaagtgcctcttcatgattgtatgatgaagtattattcagtttagtcatcatttaggtatcaggtcgggcacacacgaaacccaaaccaacccaaatctatatcattatatatatatatatatatatatatatatatatatatatatatatatatatatatatatatatatatatatatatatatatatatatatatatatatatatatatatatatatatatatatatatatatattgtataatttatatttctataatttttatgttatataattctataatattgagatagtacaacaactttatttcagtcttatatgattttttattaatatttttccatattttttttaaatgtctggttacacgtcgtcttaactcaattatgattgattggtctagtttaagttgttaatataccccctcaaaaaaaaaaaaagttgttaatatgcctgatcacatattaaattgaattggtcagaccgattaatattgataagtttggaactaaattatttatatctcctaagttagtaattactaactactgttaatagaagttgttaatttgtgactccctgcaaggcttattgtaaaagcctctgttggatttgattaattaatcacttttgttgttcagaattaataactttttaaatttgttttaatagtttcaaaagtcgtataaattttattaaaattttaatttatctaaaaagatgaaggtttgatgtgaaattgctaaagcccgcgtataggctaggctatgggatggattgacctgttcttgctgaagcatccaactaaggctgagtgtatggtgtttaagggtcgaattcgatcgggtttaacttaattctgtcacccaatttgattaaaacttaatggactaagttgagtctggtttatgtatttttttttatatataaatttgatccaaactaatctaataataaacggattggattaattgaatctaaatatttttaaaaatattttttatttagtaaaaaataaaaaattttagaacaataatttaattttattaaagttttataagtatataataactaaatatatttttaaaaaaatcaaattataataatatttgactaatataattaatgattttaatgctaatatattatttttattttagataaaaataaaatattatattagcataagaaaatataaataaaatcaagataaacataaaaaataacttaaaatgaaaaaaatatgagtagtttaatttaattatttaataaattatatagactaaaaattaatatgttttgtatttaataattaaaataataataaatttaattatatgataggagttagatcaaattaaaaaaataaaattcgttattcaatctatttatgatcatatattaattaagtttaattcaatacaattttaatactttaaaaactaatccaatataattgaatgggttgacccataaactaacacccataaacactcctatccgagggagatttaagtcttgaataatataccagaataataaacaaggaaaaaaagatttttagtttagtttagttttcttaaggatggcttattataaaaatccatcatatatccgcttgagatgagttggtactgctgtaaaaaagaaaaaggatgagttggtgcacaacgtgcttaatggccatcacaaaatagctgaatatcatgatatcatcagatcttatatgttaacgactataaagtgcaacaaatccaaaagtgacacaaggcaatcccacctccaatcataatgtcccttcaaccattacgtaatactcaaatgataacatttttttttttatatgtaatagatatatttattaattcactatttatattttaagttcaaataaattgatccaatatgcacatgagaacttcaatttttatgttattaggtcatttgttggccaatatgtttaaaatttttaaaaaagtaattttaaacacgtaattttttaaaaaaaatatttttttaaggagatagaaattgtttcttaaaaaaatatttttttataaaagttgtctagacaaacacatcaaaaaagcataaaattatttattctattaaaatggattaaatatgattttgatcctccaaaatattgactcaattgattttaatcctcctaaaataattccattatatttgattcctagaaattttcaaaattctcctttttaaataatttatttaactccattaatttttcaattaaaactttacaacaatggttattccaacattagcatttttaagtttagcattactattccgtatgccagaataaaaaaaatgataactttattatttttaaacaagtacatataattaaactctcatataactgatatgttagattcaaacttgattttttcattaacaaaatgaaaataagctaggagagtgtctatctacttttttaaataaaataaaataaaggaggaaagagaagggaggtttaataaaaagtgagcgtagttaattttatagagaatgaaaacgagttaaataaaaaaataaaatcttaaggagtatagtagttactgtattttataaaaattaaagataaaattttctaacaaaaagtagaaactaaaatgagaaatattgcttataattagtatatagattataaattttgtgtttgagtctttgagttatggtaaattcttcgatttttacattagaaaaagattatagattttaaaaaaccactcttatctatcaattattttattaaaagaataagatttttttcaacaacaaaaaataatttcaaggtcaatccaatggtaatggtaaggctagttaaaaagaaaaagtcacatatattaacatgtaattctttttgtttaaataaaaagtgttttaaaatttactttaatgttacttaattttgggttgactgcgataatttttaaaaatatgaatcatatgggtcaatggttaattttccctatttaattggatcaaaagcaaagttttgattcttcaattataaattcttacaagaaggcacaaaagaaggaaacatcacgtgtatatgtactaataaaaaaccctagaagcgtgtaatcaaagaatcaaacacttgttggattcatctcagtttcacaaagggttaaaaattaccctccgtacttggtccttttgcaaggaggaacagcacacgtgcgagtgaccaatgagaagctttggcgggtaaaacttgactgtttgaactactcccctcatcaaaagataactctccactgcccaacaacaatgattggtctatccctaaattcccttattgcccctacattgacacgtgccatctagcaaacaagggacacaacatctctatgatgaatccaaaggcaccaaaacaataacaccacacagttcacttctctccgtcggtttcttaaccatttatgaaaaaattaagattgctttgccggctttgcttgtctcgttctcttcctttccacccaccattttcattttctttctttctcattgaggattaaacaagttgttaataaagaggtagaagatttttcatttgggttatcgttaactaattgaaagcatgacttgagcattttttttcctcaactgatataggtatatttttatattgtcaataccaaaaactcatcttaagtctgatttttaaaatagtcattataaaaactaataatataacaattaaataataatataaaattgttagtgtcttagaattaaatacttatttttatactattgtaggaacgtcttttaagtgtaaatatttataaattaagtaattattttaaatcaaattaattctgacaaagactaagtcaaaatgatctaaaatgaaaaaaaaaaaaaacaatttgatcattggctcatgaattgcttcattttactagtcgggcacaagaaacaaaagaatagttgatcatatgatatttttaaggacaattattaaaaactgaatgatttaaaagtaattaattaaatggttaatgtatatgaatatcacagaggggccagcataggtagctggccactcgtttttatattcatattttctctgttttcatttcattattttcttcttctcccttcgatttctccagaacagcaagggagaatcaattcctcatcgttgcaatttttctttcactctctagattctcatctttcctctcttctaccccttcagaaaaaaccatgtcttcatattatatgtatatctagctcttcattttttcttgctcaagattatgctgtaaaattctgaaactcacagtttcagccacattttagacttaaagatctgcgcgttgacccttggcaggttcagcttttggagttgttcatcctcataagcctttgattagtccaagtttttcttttttttctctctctctctctctcaagttcaaagttttgtttcctttttcccgtgtctttctctctcccttgctgtggacttgtggaatgctaaggtcagagatttctgagacatgttctagcagacttttggtgaattgggtcactgtggtttctgtcatgggtggcagagaatctggatccacagagatctaagcctctctctctggtgttttgttcatcacacacccttttgtctggcatagtcgtgaaagtgaaagagtgagagaagatgatgaaaatgaaaaatatcaatagtagtaataacaataagacaaatggtctttcttccatcattaacaatggaggttcagatggtaacagagccgagcctggttcaaaggaatgggagatgaggccaggtggaatgctggttcagatgagaacaactgactcggatcggaactcagcacttgtgcccacaattagagttagggtcaaatatggttcaatttatcatgaagtcaacattagttcacaagctacatttggtaactcttcactttttttcagttcttattgttatttatttccctttatgttctctcttctgtcggttgtctttacctttctcttattggacaaaacttagatacagatttttaggtgtttctgattgttcttctatcagaaataaaggtacctggtaatctgtgtgataaaagtctgcattaaatgtcgacctagattgttgaggtgaagcatctattttggtagtgtaacatcaaaagcattcaaggaactgtatccaagttttgtccttttttgttttggttacattggttattgtgtgtttatgtgtgtgtttaatttctggggttggaggggagttgaagaaaatgctgtctgggccaactgggttacaccatgaagatcaaaagctgttatacaaagacaaggagagggattcaaaggcttttcttgacatggttggggtgaaggacaaatccaagatagtgctagtggaagaccctattagtcaagagaagaggttgttagagagaaggaagaatgctaagatggagaaagctgcaaagtcgatctcagaaatcagcttggaagtagataggcttgcaggacgggtatgtattatggttattaatttgttttaatgttttttgaatttttccttataattttcaagcacttaattatgagtgaggtgggattgtattaaatgcttgagtagttggaagctgataagtgattggaattagttaggtatcagcctttgagtcaattattagcaaaggtgggagagttgtggaaacagatttgcttaatctgattgagttattgatgaatcaattgcttaaattggatggtatagtagctgatggggatgtcaaattacagaggaaaatgcaggtaatgtatagacttgctcacttttgtgttattagtacatctcaaattgcatttgctaataatggtagtgagacattaattttgaaggtaaaaagagttcaaaagtatgttgaaactctggatgtgctgaaagttaagaattccatgcctagtagcaatggaggccatgccccagtgcagcctcaacagaagcattcaaatgggcaaaggcagggaccagttcaagagaaaaaacaacaagcattcaaatggacatcatagattggccttagcaccaattcaggagcaggaacaacaacaaccctcaaggaattccacctcaggagttgtagttaccacaaattgggaattgtttgattctgtcccaccattaatccctgtgccatccacatccccatcaccacaccccccggtgaccaataattcaggtcctcacaagttcaattgggaattcgtcaaccaattaccatagtgttttacttgtgttgatatgatttgggtttgtcttccacttggagtgttatatgttttacattcttttctgtatttagatttgtttagcaacccctataatctgtcatttacttcagaaataaatggggttgatatgatagtgattatcataaaaaaagttacatttctgtgattttggtgtccaccgaattcatttacctgtatgggcctattttttatggatatattatatacaatattattgtaagcatttgtaactttgttaatagaaacattaggatttagccacatcttaaggacaggtatatttcagagtctaaaatcccatttaaaaatgattttgctttctatccatttccattattactttaggttttgttgtatttcttggtgaagcagcattggaccattggttgatgacataataacagtttttcagtatcttagcttcttgtgggggctacaagtgacaaaaagactcgcatctattaaagggttttactaatccatccaatcataggaagccaagtccaaaaagtgttttaaaagaagagaagatgaaatgataagtatggattagaaattactattaataaatcaaaaagtttgctaatgttagtgtttctggacacaggctattccacatttagaaacattcccttctttggcctcaagcaaagaccgtgaggccggaggagtgaagaataagcgtgtttcaatctgctaagcttgctgcagtgcaattaaaatggctatgataattcatgcaatgattacgtagtagaggcattgaaatttgtcttagtaagcctacaaaatagtcaactttttttgtaggtaatgatcgtaatttacaactgcataaatgaacatttatggacttgaaataaaagcaaattttcaaacacgatcctccttctatctaagagcaagctgtgctgatccatgaaggtacctggcaaattcaaatttaaaaaagtccttacttttaacatggtcttcctggagtctgcgtccttaagtcagagagttggttataaattaaaaaaaaaagaagaagggagtggaagttattttatcttttactcttttttgaaattaaaatatactttgtgagtgactccgaaggagcttcttaggataggaaagtacatgaataacatcatggagtttcgaattgtaaaatctcttaactctcttcttttaatttcttcatgtgtatgaggttgttcatttgcttgtctatgtccatggctggcttggttcttcttttctgggttacaatgtaatctacttatggacctcaatttctattaatgatatttggtctttcatcagacaattaatttgttttgctacgtttaatttctttttagaatttaccactctatttatcagtcttttatgtatttgtgaccaacttcttatgattgacggaattagaatgaatctattaaaatagcgaatgataaaacataatttagggggttttggccagattattcatttataatcattctctatgaacttatgcttccaccaaatttgaaccctaactgaccaagttggaattgaattaggggaaagactgctaatagtgtttgatcagacctattaactaattttagagaagtcagtaattcaagattaattagaaattcgattaggttaggaattgggaaatttatttgcatgattagaatcataaccttaggcttttttagctgttaatctcttacactattattgcttgctctttgaattatattttcttgcgagtaattgaacatcaatcctcaaactgtcgatttaaaccaaattatttagtttcgtgcaaaattggattattttggaattgtcattgaatactgtattcaaacttagatccaccataattaccacatagaatatatttatctttagcgaatatattttatgcataaaaatatctatatataacatcacctcctaaaacaaaaacaaaaaaatacacacaatatgtatattttattttttaataatgattttctacaattttatttgttgtaacacctccatttttttctttctatttctctctttctttcttatcacatttttctattacactacataaaatagtgatgctacatcgtcctaacttttgaaaaatcatctttactcctttgatgatttcaaacactttcaaaaacatttttatttgtttcgaaatgttttcacaagatttcttacgcacttgttattatgtgtagtgtgtgtaaaaaagatctttcaatatctagccagtgtaactaacttgagtttgttttacaagaaaaattaataagatttcaagttgctaagataatgtaatacaaactatgctagaggatggagaaaagagcaacagtgaagtgaaagatgtcacttcattggagtaaacctctttgttgtaaccaaagacatatatgcatcattcaacttctaaaaacattttgatgataacaaaaaatattaaaatttatgttaaactaacagtgtgttacatgtgcaataaaacactcaataacttgttttataatttgcttttgaaaacatgatatgaaaacaaataaattttcacatattctgccttctaacattacataatacccaaataattacactttatcatatttttgaaatgtgatagatatacttattgttattttttaattaaatttgaagtatttattagtcgagaattaagaattaattcctcgaaatactaagatgcatgtaagataccaatatctcatactaaatatttttcataggtgtaaacttgagatcaaaatctaatcacatatttaacaacaagattacttaccaatcatatcatactatattaataatagatatatttattaatttcctatttatagaatttgaaagttaatcccaaagttgttgaaaatatgaaaacgtttattattaatctgcctccaagaactgtaatttttatgttacttggtcatttatgtaattagagtgtctatgagtctatgcccgagtgctttcaagtattttttttatgcaactttcattttttataaccaaattgaaatttagtacaagttataagaatttgtattaccgacaccttaaattcaaatttgatttcttcattaacaaaatgaaaaagaaagaactattttctttttaggtaagcgataagatatacaagtaaggcgtatgtgtgcctaattaatatgggactagctagaaattgtcacgcatattacatttaatttaaagattgaggagcatgcattaaccaaaagtgtgatccatatgcattatttgtttatggttgtggtagatgaagagcttgttgtttgtggatgtgtcaatttgtgaccgaaaaaaatgttaatatgtcaattttttggaaaatggaagtgagcatcaaatccggtgggtgtttgacttaataataataataataatatgacgccaattgcgtattgataatggcatagggcatgcctttatgggaaggaagcatcttagccttgcaattgcatggtgttctatcattttcatagcagctgggttttggttatacatagcaattaacaaccatttttggtgaaaattttaaatttccaagtttattagaaacgtctttgcaattcatgatcattgaaacatctgaaaagtacccacttgggcctgcagtgttttgaatgtttgcaaattacatgtacacagtcatttatttctgcatcacaaagaaaggaattgtccactgaaatcaaacatctcttttttcctttgtcagagtgaaggatttcttctttattccccccccttcttggtctatttttttttcttttttggacatttctgtaccgacagtgtttttatttaacctaagtttccctaggtatgacagaaagacgaaaattagtctatatactctgtttatttctaattttatgattattgttatgttataatgttattttcggtgattttctacttttgttttctttatgtcttcatatttcgtgaaaaaaaagttgttagattcttcttttcaaaggtgacagtactacttgcaagtacatagacaccctaccatatctttagctttacaacgctttaatttgacactttgagccaaagtgtatatcgatttaatcaaacttagcacaaataatcattcactaatgaagagaaaaagttgtctttccaaaatgcataaccctctgttttgtatcataagataaattttgttaaaatattctagaaaatgtagcttaatttccatcccaaccaaagccatatatacattatgtgaaatgtttaccatgttatttttcatccactaaaaaaatgctagcctttatttatttttatttttttgttaaagttaaggtgagttgaattttaaaagtttatcaagatctagataagtttcccgtgtcaaatagtaattaaaaatatgtttatagattacttccaataaaattctcatattcttggtgaaatttaatttaaactcacatcctagtttttattttaaaatgaaacctacatcctcattggtagaggtgtgtaaaaaattgaattaaatttaactattctaaaatcaaattaaaccaaaccataataaaccataataatcaatttgttttgaataaaattgaatcaaattaatttataaaaaagattcgaataaaattatttgcataaaatggttcaattcaaacaatgcaagggtgtgaaaaagaaaataaaccaagccaacctacaaaatccgaacaattttaagaaaaaatctaattgaatcattttaaataattttatattcaaatcaaattatttttataaaccgaattatgcacaactttatttgtaggatatgagacttatccttatcaatcatcctaactttcttttgccaaccaattatgttatactttagaatcaaaataaaattctccctattattttctaattggtagtggggagagaaccgatacatattaataaacatatttgtacatgtgatatgtgtaacaacgaaagatatagacaatcaataaactgttactcacatactccaactaataatcattaagggtggaagaatggacaaagcagactgaaacctagacatgcccgtgatgttgttgccttggacattgataaattgttttttagaaataaagtgagtgcagaagtttccaagttttgtgtagttgttgtgatagtgaatcaaaaaacaagccaaaatcactaacagtaacaccttacaacaacaacaacaacaacatgcatcttgtagaggtttcctttgttattcccttaaattataagacttgttgtgtttctggttttccctttgaccacactccacagtccaccccactccacatgcttacacatgcatatggcttcgacactaaccatacgctagcacaaaaagctatacaaacattctagttctacctaacttattattatctttatcagtattgtcccataaagcacttcctctattttattttttctctttagtcttctttaattttcatttttctcttacctttatgtgtgtgtgatacatttcttccacatggaactatatatgccctggtaatcgaatataatggaactgagtccctttgtctatgtaataagaagcattttttattatttatttatttatgtatatctttcatatggaacccattttaacgtgtacattataataattaatttaattttttatgtcacgcttgaaaattagttatattttacaatagtactacagcagattcaagttatctcagtatcaaactacatgtttcaataattaaaaatgaatttagtgattggtcatgaatataaaagattaatttgacttgttacattctagtttatctccctaaataatatagtgacgacaaaagaaaactcacggagggtgatataataactgaccatatcgatcattagggtcaacttaaaacgatgtttcgtaatataattgttattttcgtgatctataaaaataaaataaagtaatatctacaaatatatgaacagttatagttggctgcatatacagaaaaaccagttcaagcgttgtgattccattgatacatcttttctaatttttcttttaaatgttaaacatgtataatttttataagaatttattataagatatactagctatatgttaacagttgacgagtaatatcatatcaattcatcaccaaacatattatcgcttaaaatttaatatgtataaggttttccgtacataatcctcttgctttatgacattgacgatcttgataccccggtgcctcttattgtaaacatcacactattttgtataaaaagagacattaaataaaaattatctacattttattatttcttttttttataaaaataataacacagataaatttaatgcaaaatttaatgtataatgatgcattgcataagagtaccattgatgcattaaaaatcactcataatcttatacttagaagttaattctaaagctagtagctagcaaacaaaaattgaaatatatttctagagtaactgtacaataatattatttaatattaattattttatgtttagaaggttaattatagagtattttttagatagtgttttgtctagattttttttttaaaaataattttcatgaaatgatttaaaatgtcattaatttaaaataaacgtgaccatattgtgaaatcgagaactatataaaaaaataattaatcaacaattttcgtctttctatcttaacatggtgccaataatcagaaacgactattatcattaggaaattaagtcatctaaaattgttaaaaattcttaaatttacaccaagtccataatatttgtgatataggggttcaatgttattcacttcgttcctaattataacatattttttaaatatttgtttcacttttttataaaatcattttctaatttttagatacattaaatatttattttacatattttacttaattattctctttttaaatactaatgaaaaataaataaataaataaataaataaataaaaattaataattttaaaataataatattaataattgacatatttaatttaatttaattaaataaattatttttttaaaagacataaattagttaaaattgttttataattaagaacggaagaaggagtataaaactacactctagatctcaacgtttatccaggcaaggaaaaagtaaaagaaaatcgtgttccaaagttattataatcatatttattagtgaattcagttttgtttttgagtgtattttttctttagaacgtgagaggttagttacttccgttaaaatgaactcttattaataagtgagtgatttaactttatgttaagaaatctaattttgtatttcctccacctcgagaatatatgacgtcttaaaaaaattattttaaaatatgtcgttttataaaattaatcataaatcaattttttttctaaaaatatatttaataagtacttaataggagtaatacataaaaaataaaaacaaatcattaattaaagataaaagatgtattaaaaaattatctaatattttctttaaaacttaacaaattaattacatttttttaatacttatataaaaatctttaacatcacatattatggaactaagtatattttttttcataaaattcgtgtataaagtctttagttatttgcaattggacggtaccttgtccaccatcagatgtctcattgtgaactgcccagtcccctaaacaacaattttatattttgaactaattcccatcgatgcttagaaaaagcatatatctaatctccattaatactcagatcgagacgcactaataatgatatatataatattcttaaattgcatacctatctattttacttcacataataatataaaaaaatttaaaaaatatttttttattgatatataaaaagagatacacccacatctttattttgtggtgtaattatatattgtaatctatgataacaatatataattttatttggtcctatatggtcaaaaatatttttatcactctttaaatcacctactacttttttaatataaactctcatgtgtcaaattcattatattaaacttaaaaatataataaatttttaaaaaatatagtatttttaaaagaaataaaatacgtggttagacaaactcgtgtttctttctatgtataataaatttattaattttttttaataattaccttagaagtttaaatacaaagtttggttcatagtattaaggttttacactaatattgcatgagaattaaactctaactaaaatgattcattagagatggcttattgagagatttgatcgaataatatgcagagtcataaattctaatctcagtataactattacaaataaaaaatctaaacaaatattataaactataatacacacaacctatagaatgagatcctcactttctttacttactcatttataaattcttcaaatttttcttcttttatttgaatgcgcatttcacacccgcgtccctacaattaacaaaagaaaaaaaaaactctcaattttctccaagtacattttatctttatttatatattttattatttttaattgttgatcccttttaatccattttttttatctctcttcaaaaataaatttatatcataatttaaattatttattgtgaatctaaaataaaatttatatactaaaatatatctattttgttatgaattttaattaaatataatttctatatttaaaatattttttaccagatatttaaaatatttactcgttacaaattttagctatataaaaaataagcatttgaagtattcaatgcataagtgaaaaaatactaaaattcattaataccaacttaataatgaaagcttgatagtttatacgagggcttaagttcaaacttcattattattaccattatacataataaaaaagctaaaatattactccggagtagtagtagtagttataatagtctttttttaagggctgctaaacggctaaagtattggttattatataaattaaaaaatgtgcaaaacttaaaagaaaaaagaatatattttttaatttgcaattgcatgcatagttagccaacaaccacagtaggtagaaccgtcaccgtttcgtagcactttctcacgtgcgacgaagctcgcgcgtgccaaaactgtcggtggatcctaaatggaggagacaccctttgaatttgagcagtgacattatgtcgaaaaagctgtagtttgcttgtcttttcgtatcttagtcatgcctccgatgcgcgccacgtgtacctacattccttgatgtccttcttctttttcttgtctcacaattttggtttggtatatttattcaatcagagtaataattattcttgccctaagaaacctattagtagtagatattccattccaagagcttgctttaaaacattaacaaatctcacaaaaatgaagaacttagttttaaaattaaatttcatataggttgcttttttattttgacaaatgctaactaatgattcggagattaatgaattaaaaaaataatttattgatatacgtaaagttatgttatttataatttttttaatattttcctgtgatttacacaataaatatatatttttatttttttaaccaataatctaagacctaaattaacatcatcctcttatttttacttacatgcatgaagtcttatatctttgattctgaaagaaaaagcaaaagccaatagtttgttggttaggttgcattggaaaataaatttatgtattataccagattttactaactgtacgctacttatatatttatgcttcaatcacaaaaagaaaatgtttttatttttgtttatagcataaaactattaaatgtatatgaagaaacaaaaagaaatatagtgcttgtctattttatcaataagacctgtcatttcgatttcgcttttaaacaccaaaacttgttgagttctataaataacaattgataatgtatagtccctattttcatcataaaaaagaaattgaacaatttgataaaatgatacattttaatttaatgtttttataatatttttttaatcacaacactcatcttaattattttatattttcctattattttcttatctctttctcattgttaaaaaatattgtgagaattttaaataaaaataacatgcaattatatatatagacacccctttattgttttctctactctatggacaaatttgcattgctcgcaattagattgagcattgatgaggatgaagtattggacttaattaacgacaaagataactagtccaaattaaatcaattataccattaaccgacgatggagaaagacatgcacaagtggtttagtttacagaaattttgaaaatactataaaatggtaaaaaaggacagatatcataattgtctgtttaatagagtaaaagacaagctaacctagtgtttccattaaatgaagctattggcatgcaattccatcaaaaacgaaattttacccgaatcgaaagggaccaaagtgcttggcctccatttttgaattcttcccttcattctagttaagtactatataatccccgaaaacaataagtgggtgatctcacataatattctaatatatatttacataagttttgactgatctgatcattctcttttgtacaaactatacatttcaaacacaagcaatatttgcccaaagtaatagatcttagttctcatggagtattatagtgtggttgcttttgattattgtgaaagaaaatacatattttttattataaactattctaagtacaataaatcatgagctgtgttaaatctagttgtgtttcattgcgtttttattattattaatgttttaaaatattttataaaataattttcaaaaactgttttttagaaaatgagagaaaaatatgtagaagtgcaagaaaaatataataatagaaaaattaaaatggaaaatcaaaataacttagaattgttatgaatttttggtatttaaaactaaaagaaagacattaattttacaaattttttaaaaaatactcctgtttttatttattttcaaaaacaaaaaataatttttaaatacaggaaacaaatgggtcaatggttatttttccctgttgtaattttaaaacatgaaaagtaggagtatggcttactatttaattggttcaaaagcaaagttttgatccttaaattatactattgttacaaaaaaaggcataaaagaaggaaacagcacgtgtatatgcatgtactaataaaaaacacctagaagcaagtaataaaactcttgatggtttcactttcaagttttcaccaagggttaaaagttacccaccccacttggtccttttgcaaggagggacagcacacgtgcgagtgaccaatgagaggctttggcgggtaaaacttgactgtttgaactactcccctcatcaaaagataactctccactgcccaacaacaatgattggtctatccctaaattccctatctacccctacaaagacacgtgtcatccagataacaaggggcacaacatctttatgctgaaccaaacagcaccagaactctaacacaacacaattcacttccctccgtcggttttcttaaccatttatgaagaaattaagattgctttgccggctttgctggctccttttctttctttccaaccattatttttcttttcttttcatttatacataacttaattcttctatttttttcaaaaaaattatcatggactaaacaaatttttaataaagagaaatcacctataaaagaaatattaatttgtcactacaatgatcgtcaattaattaaaagtatgtttggagtgaaattaatttctctccaatagcatagggatatattaataaggaaaataaaaatatttaaaagtaaataattaatgtcacttttaagataaaaatgtcagttcatttaaattgttaattcttatttttatactactatgatgctttttctaaagtgtagaataggttactttgcacatggtacatattaattagcataagggaagtgaaaattaaaattaagtgcatccttacttttaattattttcaaaacaaattatttcagacttgcacaaagtcaaaatgatctaaaaagtaaacaaaaataattataatttgatcagcgtgagatgcttcttcatcttcatttcattagtcgggcacaagaaacaaaagaataattgatcatatgatattttttaaggacaattattaaaaacttaactatttaaattaattaattaaatgcatagtatatatgaatatcacagggtgtcagcatagttagctggccactcgtttttatattattattatttttctgtgtttccatttcaccactttctccctccgatttctccagaacagcaagggagaatcaattcctcatcgctgcaattcttctttcactctctagtttctcttctttctttcttccaacctcttctcttctatacccttcagaaaagaaattaaaaaacgtagcttcagattattctagctcttcatttttccatgttcaatattatgctgtaaatttctcaaactcactgtttcagccacattttggtctaaagatccgtgctttgacccttggcaggttcagcttttgaaggggttggagtttttcttcctcataagccattgattagtccatgtttttctttttctctctctaaagttcaaagtttttgttgttttccccccgtgtctttctctctcttgtggtggacttgaggaatgctggggtcagaggtttctgagacatgttctagcagacttttggtgaattgggtcactgtggtttctgtcatgggtggtagagaatctgagtcctcagagatctaagcctctctgtctggtgttttgttcatcacagacccttttgctgtggcatagttgtgaaagtgaaaaagtgagagaagatgatgaagatgaagaatattagtagtagcaacaataataataggacaaatggtctttcttccatcatgaatggaggaggctcaggtggttgtagatctgagcctggttccaaggaatgggagatgaggccaggtggaatgctggttcagatgagaactgctgactctgatcggaacccagcacttgtgcccacaattagagttagggtcaagtatggttcaatttaccatgaagtcaacattagttcacaagctacatttggtaacacttcactcttttatttaatttattttttttctttcttcaagttttaatgttatttatatttatttgcctcttatgttctctcttggttttctttacctttttcttgattgacaaaacttagatacatatgtttaggcgtttttggtgctgttgctgttctttgattgaaattagagtttctccatgtaatttgtgtaataaaggttcgcattaaatttaaatgtcaacatagattactggggtgaaactccggttctgattgagaacaataccaaaagcactcaaggaactgtgtctaagttttgtcctttcttgtttttggttatgtcggttattgtgtatgtgtttaatttctggggttgcaggggagttgaagaaaatgctgtctgggccaactgggttacaccatgaagatcaaaagctgttatacaaagacaaggagagggattcaaaggcttttcttgacatggttggggtgaaggacaaatccaagatagtgctaatggaagaccctattagtcaagagaagaggttgttagagagaagaaagaatgctaagatggagaaagctgcaaagtcgatctcagaaatcagcttggaaatagatagacttgcagggagggtatgtattatgcttgctattgatattactattattattttttttgtgaattttttcttttcattttcgaacacttaattatgattgaggtgagattgtattaaatgcttgagtagttggaagctgataagtgattggaattggttaggtatcagcctttgagtcaattattagcaaaggtgggaaagttgtggaaacagatgtgcataatctgattgagttattgatgaatcagttgctcaaattggatggtataatggctgatggggatgtgaaactacaaaggaagatgcaggtaatgatggagacttaggtgcattttacttatttttgtgttattacttattagtatatctgaaattgcatttggttatgcactcatggttctaatggcagtgaaacattaattttgaaggtaaaaagagttcaaaagtatgttgaaactcttgatgtgctgaaagttaagaattctatgcctagtagcaatggagaccatgccccagtgcagcctcaacagaagcattcaaatgggcaacaacaaaagtattcaaatggacatcatagattagccttagtaccaattcaggagcagcaacaagaacaaccaaggaactcaaatgagaattctctggaactataccaagagcaacaacaccaaccctcaaggaattccacctcaggagttgtagttaccacaaattgggagttgtttgattctgtcccaccattaatccctgtgcaatccacatccccaccctcctcagtgaccaataattcaggtcctcccaagttcaattgggaattcttcgactaagtaccatatcacgtgcttttacttgtgtggatgtgatttgggtttgtcttccacttggagtgttatatgttttacattcttttctgtatttagatttgtttagcaacccccttataatctgtcatttacttgaaaaataaatgggattgctatgatagtgattatcataaaaaaaagaagataaatttctgtgattttgttgtccaccgaattcatttaccaaatgtatgggcctatttttgatggatatatgtaatattattataagcatttgccactttgttattggaaacattaggatttaaccacatctgaatttcagagtctaaagtcccatttatttcttggtgaagtagcattggaccatttggttgatgacatagataacaaattagtatcttagcttcttgtggggactacaagtgagaaaaagattagcatctattaaaggattttactaatccatccaatgataggaagccaagtgcaaaaagtgtttaaaaagcagagaggtttaaatgataacaatggattataaatttctattaacaaatcaaaaagtttgataatgttaccgtttccggacacatgctattccacatttaaaactttccctactttggcctcaagcaaaggccgtgagaatggaggggtcaacaataagcctgtttcagtttgcttagctttctgcagtgcaatttaaactgcttatgataatttatgcaatgattgcatagtagagacattgaaatttatcctagtaagcctacaaaatcatcaacttctatgtgggtaatgatcgtaatatacaaatgtggaagaaagcaatcctccccgggaatgattactggataaataatcatgtatggacctgaaataacaaagtgcagggctcatgttaatggtaattattgaaattttcatatccacctcagaaaagctgaaaatcacaatttgaaaaattagacatataacccaactctttctccaagcaacctactcttcagtgcaccttaattattgctctattagtttgggttataaaaatgttttctgcttaatttaaattacattatggttctattaattcaatcaccaattaagatgcaactgtcaatgcttattaaatcaagctcacactctttgttctgcatgttaacaccctttgttctctttctttgtgttttcccttaaccttctttacaaaaaccaggctttgatgatatatttatatttgatcaattttttcaaaatttataagatagtatatcattataattcaacagttaaatatatgaaataagcagttatgcacttgtagctaagacagttgaattcgaactaaaccgaactgtcttgaattgtttcgaactgcttatgccatttaaagcatgcctttgctttctttccatctctatgattgctataggtttctgtggtattttttagtgaagcaaacattggttgaaaactgagaagatgaaatgataacaaattgctattttttggtgaagcaacataataacaaatttttggcgcatacatatctggccaaaagactcgtatctatgaaagggttttttttactaatccgtccaatgataggaagccaagtcacgaaaaagtgttttgaaagctgagaagatgaaatgataactgtggattagaaatttactattaataaatcagaaagttggctaatgctaccctctctacacaggctattccaaaattagaaagtttccttctttgacctcaagcaaaggtcgtgagaacggtggagtgaagaataagttcgtgagtttgatgcactgcaatttaatttaaaccaacaataattcatgcaatgattacgtagtagagagcatcaacatatttgtcctaataagcctatagaatcatcaacttttttgtaggtaatgatcgtgatacacaaatgtggaagaaagcaatcctccccgggaatgacatctgcaaaagacaatcttgtatgaacttgaaataacaaagtacaaggttcgtgctgtgggtggtttgttcacatgaccaaactgctccttgaaagttaggaattgatttagtaaagactaaattatacaattttttttgtttaggtttaaagaaattatatatatttttttatttcttgaaatctacacaaacctttctaaagatttaaaaaattatgttttttttttctgtttttaaaatatatttagatttaatattattattgttggtataaaattgattcagattttgtgcgttaggtcattaatgacttgattagagtaatttcattttggtttttgaaagttataattgtttatttgacttataaatttactagagtgagattggtttaatgattttattactcacggtgttcatttgacttataggtttttggaatgataacttgattgaagtttttgtaacttattttttttatatcaaaattttcttagtgtcaaatgtttgggtgacatttagggagatttgtgtgggttttaaaaattaaggaagatgtgtaattttcttaaatcttatgggaggtttgtgtaggttttgaaaaagaaggaaatacatgtataattttttaaaaccttaaggaagatttgtataatttcctcttttagtaaattatctctattcaatgttttttttggggtgcatgctattcaatgaaaactaaaccaaaagaaataaagaggtagaaaatatttgtgtttgaaattgcttgagattggaaattcaaataaaagcaatcaattaaaattaggagttgggtatacaattgcataaaatacttggagaaatttttttgttacacatagtggtcctacttaactcaaacaaaattattttcacacaaaaatatctatggtttaaacattttttttaggagaaatcaattaataagaggaaactttcaagattggggattcactcaatgactttctattggattaattttttatgtatgctttctaatttattctctttgaaggtgaaataatttaaggtaatctttgtttccttttagaatataaagatgtatctaattaaaatgatttctagcttcattaaactctttgttaattcaattgttcctcaaaggattaaactcactttcatgatctaaagactaagttctttccttttaggtaacaatgtctaggttcacctttcaattcttccttacatgtctaaggttttcaaaaatggtgataaagcatttcacatcataaacaaaatcaatgcgtccttcactccataaattgtttctggttccaataaaaaatataaaattatattttggattaacctttttagaaggttaaaaaaggtccaggaaacattttttaggtgctggaagcataagtcccaaatcaaactaatttttttttgcctcgtttgagcctggcctgaacttcatcagcaccacttacgtccttttgatttttaatatagttttggacaaacagtaatgaatacaatgtgttttgtttggatgaagcatatggtagatgggggtattgttattgatcctactaaatttgttattggtaatatgtacttgggtgcctttttatgatgcatccaaatagccctttgataggaaaaaaacaaaaatatgattccgtcttgcaaatagggtgaaaaaataattaacaacaaaattatgattttgttatttaagtgtatagtaaaattatgattcggttaatttttttcactccttatttgtaaagagtgaaaatatgtttttgttgtacattttaatagttacacaacagaaatgtgtttctgttatactattttttagtcatttttatttatgcaaggttgttgagttgagaaattgtccaataaaaatgtgtttccatagttatattttttgttgatgcattgtgtgtaatgaaatttcacaacaattagcaaactttatattccacattaactgaataaaaacattaatcagggttttaccaagtgtcatgacttacaacattatcaaactttatagttcacattaaatgaataataacattaactagagttttaccaagtgtcaaatgaatacacataacaatacttaataaaagaggagttaactaaaacaactcgaacccactgcaacaaatctaaggctcttcccgaaatttcaaacccaatgcaacaaatcatcttgatttgcaaaagctaaaaacaaaatatttttcttcacttccgcaacatgtataaatataaaatcaattgtcaactaatcaacctccctcatcaatcgtgaaatgattgaaaaagtcatggtacccattttgtgtgataaagcttgtgttcctcttcattgcatttgggctttgccatttatcttatgtttccatggagttttcctcgggaaaaaataacaataaacatcaaactgtttggtcaaaccataaaaatattactatgaagtcacaaatatgtgttatgttgtaccctttacaatgaaaacgtacttccacagttatttttctccaattgcacaacgaaaacatgattcaagacggaatcatgattttattgtgttatttgattccactcccaaataacacaatgaaatcatatttccattatgtttttttaaaacaactcaacagaagtattattttgttgtgctattcatccaataatacaatggaatcgtaatttcattgtgttatatgttaaaaatcacaatgaaattgtactttcgttgtgatattttctaaaacaaaaaaaatgataaaatatgatttcaatgtgattttcaaccctaacagaagtatgattttgttgtgtatataaaaaaatggaaaaaaaatcttacaaccatagaagaatgagaaaggagaaattgggtgcaagggttgggaaagagcaatttggagagggagacatatgagaagggaaaggagaagagaaaagaagagagagacaatagagggaaagggatggtggtgagaaggaggaaggaggaagaaggaaggggaaggggtaggggtgggggaaaagtcacagaaggacacttttgtccatttttactactgttcaaaaagtgatagtggaaatagtaaaagtggtagttggaataccaattcccaaagtcctattaaaacttggattcatctcattagtggctcgggctcctcttaaacaaaaaaaagcatcttgtgtcctctatgcatagtccgtttatagaaccttgtattaccaaaataaaattaagaaatttggttcgaaaaacccaaacgaaaataaataaatctctccacataaaaattgcgaataaaaaacgaattaagaattaaaattgttgttttataaaaaaataacatttattgttttctctgtagaaaccttttattttttttaaatttttttaagtggaactctatggaatcttacaacttccaaggaaccgattgtatgattcgttcagatttttatcttcaatatgattcgttcatattgaagaacaaaaaggaacttatctccattatacaagatcataatttcgttataatccactacatgagttactagttatttgaccatccatattctgtcaaataaacaaagttatttgacaatatagtgcaacccacttcttattgggcttaaagccttcaattaactcacggagagatggggctttgaattagcaagtttttcaagtattttaaatttaataaaaaatcaattaataatatattgtttgttgtttttacagatatatctatcattagttaatagtccgctttaatgtacatttttcttaaattaaatattattatattattattgttcaaataaaatattaatatgttattatttaaaatttatatttgttacttcaacagaaaaaaattaaaataaaattttctaaagagattctatttttcttatagatatacttaaaagattttattgataatgagttttgaatttggtatattggcacaagatatttaacttactaataagattttgatgttgatgtgaaattttaggggattttttttggtaaatattttaggattagttaatttgaatttaattttttaataaaaaattaatttaaatattaataatacatcaattttaaattttaatagttggtaaaaacaattttagcgctaaaaattaagggagaaatggctcatctgattttttttctgcatttgcattagaagcatatcactttggttggaatcattagattattatatctacattccacccgttcgttgttataagtaaaataccaaattcaaatatcttgaattcaaacacaataggcgaacgatttataataaaaatttatcttagcaaccaaagttatggatggaactttttttttgttggtgtaaattctatttttataaaagtgttacggaagctttgtttaccaatcactgtgaggtggagattgatgagtgacagggataaagagaattatctttaatatataaatgcacgccaagttgaattgaagtgagatttattaaaaaaattcgtgatgtttagcatttccgttaagcatatatgctcttttattattaaaaatatctgagttttccacaattactttccatcttctgtcaaaaaggagcaaacacacgtgcattctttgaagagtctccatgtattcctcactgggacgttcgattcgaattttaagtcctttaattttttttaaaatccatgttggctttattcttacattaaatggttgacaaattcaaaaacatataacgagttggtggttcaaaatttgattctcagagaatggaactctttctttctcgttaagcatatataccttttgcctctagtattgctaacatctaattgtattggttactctataattgaaatccttcagtcaaatcaccaggaatatgaaagtttaaagaggctagttgtttttaatttcttttaagctgtgcttttattaaaattataagaatatcatctcaatattcttatcaagttttctgattgagtttaatagatatgtattttcagtgtaaaagatttcatattatccatcaataaattttttttagctttagcataaattttcaagtaaaaattataaaaattaataattttatcatatgtgatgatttgtaattgaataatagttaaaaatatctacactattaatttggatattatttatttttttgctttcagattttaaagaaatggtgaaagttatattatttacaatattttaaaaaaagagtaatatggagttttttctaagttaatacgataatttagactcttttaagcatcatgattttacaattttagtctcctatgtcttaattgggccaatgcatgagttcctcaacttttttcatatttacatttatgtctctccatgcatcttgattctatcaagtgtttaatgaaattggtttacgcgacaaattgaacatgacaggataataaatagacacaaagcagtagctataacaaaatatatgaacttaattaataacctaaaaaggtgttgtgattatattaactttattgttgtataggtgattttgtgagtaaattatgaaaaagcaaaaggaatgcctttttttttaggaaattaatgactcaaatattaaatgaaagcaatataaaaagactacttattataaatgagagaaaacatgaaaaattcaattgagacaattgaaacttagatatcaaaatcacacaattataatatcatgttaaataaaaatgtaattaagcaaaaaataaaccaaatgccttaaactacagggagtgaaaatcacttactcaaaaaaactttcgatcatcctgaatttttttttcatgaaataattatgtaaattgtgaaaaaaaaaaactttgaattgttcgataagaagttaagaactgcatcatccttcaacttttatttaatgcaggtgatcgtcatcgaacagctaaaagcctttttttttttgacacagctcaaaacctttatagacgatggaaaggaactttctattttaattactacctctaacgtgtaaagggcaaagagtgcatgcatatatatcaagcagcaaaatagttaggtgactttccctatatagggaagagtactaagcattcttttcactcgtcaagatctttatgatggcgtacctattattattatacctatagtcaacaaattttcacactgttcacaaaactattctactctctatataaacactgtacatttttgtgcacaaagagagaatggaaacaatttaagccgtcattgccacttccctatccaaaatcatcacccctaagaataaatagtactgctactgatccataacttttaaaagggtgcagagatatacatatctgttgtttaaatatattggatttgcataagtgtatgtgtgaaatacgtaattgattatgaaatgttcttcaaattatttttattttagtactaataattcaatcttattgagatggtttttcaatacaaaattacttttttttaaaagtatatatataatattcaaaaccaatatcatataaactaattgcatgtagtacataataataaattaatatgctcatatacaaacaaatatagtataaaacaatgaatgcatttaacgtgcagcaatactggtcactttgaaatcgaaaccctagtcattcctgacagcaggcatataattgatgttaaaagttttctgcggctgctgctgaggttctgctagtgaacccatttgatttcccatttcctcctctgctagtggaatattcgtttttctccatttctcattttatattcttataatttattagtatctattagagattaattttcatagattgttataaaaaaattcatatttccaactaattattttcattagcatcccaaatagttcattgaaataaaatgtaaaaaacttaaaagtcacattatgagttatttttatatataattaagttatcccaaatgcttacagaagtacttatgttataagataatttaagctctaaataaattattctaaatacacccttagtcttgggacttgtggagctaaataagtgagtttaataattttataggtaactgatatttttaagtggatcatttttggcataaataattaggattttacagttgcttcaatgaagcctaaacacaacgtgggggaatgtagcctagcaagtcattttcctttcataaactctatctctggatcccagctcttaaatcgtcccaacatttgaaattgatttttcttaagcagaatattctgagaatcactatagctgttattttcttagatatgaagtaaattgtgaattttttatttaatcatgctttgaatttaaatgaatctaaagacaagtcaataatgacttatacttacgtcttactttacagccgaagcttttcaaatgcatgggtcgatgtttttctaacaagaaacatgttttcttaataacaagaaaggaataaaagtaatgatatcgtgtcttgatcagcagatgagattgaatttaatgtcttcctttcacagtcaagatgtgagattagtgatttagttgattcagactccactctttttcatgttatagtatgaacaaattgcaccaagttcaattacagttaacaatcttatgtaatccatgatgatacaaaaggtattagacactgttgatgagcaaatagtggattcaaatttgtatcccattataataataaatatcatctttaacaagaagccaaaacagtaatcttaaatttgagtttgtctattttaaattaaaaatataaataaaaaataacaacatttatcattcgtctaaattaaaatatttcactaaaacacttcaattcaaatcctagacaattacgtctatattcaatttttctttttacacattcttttttatttggctgccttatgtatttttcagttgaaaactaaagattattttttcaaaatacagaagttgatttaagatgttaacacttctccgcatgtactcctttatgcacatatcgtgaagataaaatcttttaaccatatatttaagaaacacaactctttaccaattatcatattctatattgatattttatatatccattttaatgacaaattaaattatttatttatttttggttgaattcgagtatttttctcgatcaagaattaataactaattttttaaaatactgaaatctattttaaaaaaattaacctcttctaatgaatattttattgtacaaaaaattagaaatcaaacttatcatattcttgataaacaagattatcaactaagcaacatgttataaattccttaaatttatgttactattccaatcaggagacaaggaaattgaaagagaaaacggtgagttggtccccttttcaataggtgcaatgcactggtggaaaagagctgcacatgtaagccatcaaggaacagtgtatgccactttcagcagaagtacttagaacttccaagttgacacggaaacgtggtttaccaaagaaaaccctgaaaacgcagctgtctcacattcagaagcgaccaaacctagatgttgaacttgaacccttcctttctttctttctcttccaaccattgattgttgaccaattaatacctttgattcccaaccctcaatagatatatactatatgcttaattttccgtagataaatatatgtctacaccagagggagccactacctatgttgttgccactcaccacgtaatgggtcactttttcccgtgtttaatagtgagatgattacgaaaatcacgatcatgatagttgattttaattttatctctctctctctctctatagtgagatgactatgaaaacaatagtgacatttgatgatgattaacttttataccactattactatataattaaatttgtaaatgaggtaggcatctatctacatacaagtcaggcttgcacagaaatctatgtatatatatagtatttagtgtaaaatgatgtaataaattaaactaacattaacttctcctatgaaatgatgccaaccgttgataaatttaactatacttgaaagttcagatactttttaggtttacttggttttagtggtccagcccccatactggtttggaggaatatgctattagggatcagtgtaagataagttagattatgttcatgcaaaggatcgatgtacatatattgcttgttttgtagggtgagctaacacaggacgcagatccatgcagctttagttttgtctatatcgtatcataatcattatagtatattaatgcaagaggaatttcaaccacaatccgcatttatatgttattatctcgtaataatcgtatacataggcttaggctcctactacacatagcacgtgtcatagttttgaagcaaaaccacaccgataagcatgagttgttaatgtactgttataatttatttattacatataaaaatcttcaacgatcacatttgttaattttatttcctgatctttatttttctcaggctctttaaatgatcagtattgcataaatatatatttctaaataaacaatcttaagggaaaattaagataataaaatgaatatacatcttaaaaagacgaatagttaattatgttttgtacctaatttttttaaaaatcacttttaattcttaaacaaaacttttatatatatatatatatatatatatatatatatatatatatatatatttcccttattaacaattttattccctattgtaaaggaagactatctttgataaaatattttaattaatttttaatattttattagttaaaaaatttatttaattattcgataaataaatttttttataatagtttctagctctttaaaaagtattacttcacttgaaataaattttttaaaacgttaggttttaatttctaattttttatattttttttcttttatttttaatatatatattttaatttttttaattatttttttaaaataaattatgactttattatttttatattattttatactttttcaattaacttaatagttaaatttatcaaatacttataatttaataaattaatttttcaatttttaactattaattaattttataatttttaactaattttgttaaatataatctaaattgatgatgtgtgacaattatgtgaatgtatgtatacatgattttgatgatgtcaaaaaaaagaatcaaacaaggctcattttacttcaagattaatataagattgtttcaacaaacaaagctttgattcaagatttcttcaagatcaagccttgcctcacaatgaaaggtttcaagtcattcaagacacatgtaatcgattaccaatggtttgaaagtgtgtaatcgattacacatcatatgtaatcgattaccagagactctgaacgttgggaattcaaattttaaatgaagggtcacaactgttcaagaaaaacaactgtgtaatcgattacactaattctgtaatcgattaccagagaggattttcaaggaatatcgtcaacagtcacatcttatcatttgaattttgaatggccatcaaaggcctatatatatgtgtgacttgggcacgaattttatgcagagagttttgcttgacaaaaatgtcttatcctctcaaaagacaatgagagagattccaaaagaacttcattatcaaatgctctctcaaaataaatccttggctaaacacttgcaaaatctataaggattcctacatgatcttttattgtaatattcttctcttgaagagagaattcttctttcattcttcttattcaataagattggttaagagactctgagtctcttgttgtaaaggaattctaaacacaaaggaaggattgtccttgtgtgtttagaacttgtaaaaggaatttacaagatagtggaaatctcaagtgggttgcttgagtactggacgtaggcacaggttgtggccgaatcagtataaaactgtgtttgtattctctcttcccttatcttatttattttgttgcaatcaattgtgtcttgcatgtttaaaaaacattgttaaattgattgttgttacttcttctgtattctaaacctatccctcttaagattattaaggccacaaggtccaacaaattacatgatttatcatgttattaataagattaacatgatgtaaagtattacttgtaaattttgtggtaaattatattttataattcctcatcttttatcactagaaaaaatttcaaatcaatcatgtgataaaatattttatcacacgattgttaaatcaaattagtaattcatatgagatgtcgtgtgattgtcatgattattacatcaaccatacaatcatttttctactttggcgccaactacatcgtatctagtcgacactaaaacatatacagctactacaaaagtaacatagggcatgaggtcgacatttgactcacacgaaagtcaaatgtagcatcaacttttgtaacttagagtcaattttacgttaacattattagcttaatttcctgtatattgcccggatactaaatttatattttatgatttataagaataattttttatatttaaaaatgtattgtatatttcatttaaactttcttttaaaaaaagttaattatctctttttcatgtctgatttgggataacaaaattaatcaaagtcgtttaattacaatagaatttcatgtcttgttaattaattatatttagtatgatttacacacatgtttttatattttacacttgtaattgattgcatattcttaatattttaattatatcacaattaataaataaaatattttatttattattttgatcacatgataattgattattgtaattataaatatattccagaaaaattaataaaataattaaagtattatataaaataaaaattcatataagatttagagatttaattaaactaaatataggctcatggtaattttcttaattatttatataatttttcaaatttttatagatatttttttatatagaaagtaattgaaaatgaaaataaaaaaggagaaaaaatcacaagtagaatgataaaaaaaaattgtttgatttaattaacctatgaaaagtggtagtatgtcttttattaaataaattttgaaactaaatatactcaataaatcaattaattaccaatcaaaaacattattaacacaatcaaatatgtctaataaaaaaaatcaaatattcaatacatgaactaaatttcaataaactataattagcatgaaaattaatatttaatgatatatttatatttggtattaatattttattctaactacatatattaaaatatatttcttttattttaacagaaaagaaagtccattagtaacagacaaattttttttggtgatgggatatcctttaataaaaattaaactattatatatatttttaaaattttatactagtggcacaatgtatcatactaattaatattgtatatatctaaactaataattttttttgaagatataataattaaatttttattagatatagaaaaattaactaaaattgttattaatttaatgttaaaagggttgtatgacaattaattttagccaaagctttctcctttcatttatttatttaatttaacagaagaaaaacattttcctaactcttattcttgaacataaaatggaaacagcatggaaagcagagacatccatccacgaattatgtggtccgtcggtgcccaacaaacgctgtgatacagtcggctttcaatcttgtctactctgtcatgtaccctttgttaagactgaagtagaaatagggtagaggaaaaaaattaggtcaaaaataaaaatgttagtgtatttagcagagggaaagtatatacatgagagaaataagaagacataaagcttatattatttctatattttgattattttcattccattttttacattcttttattcatatgttctttattttttatttttcttaaaccaaacaattacaatttcaactctgtttctcacttatttttatccattttttttccaacctattactgtttatagagtgttcttagtttgtatatatcattgaacgtacgatgcctaccggcttttatgaattttccttgcattatattgtcagtgttattgtaatatttcaacctctttgaaaattttgaacattgatgggatggagaagactgacatcttcctttattgcttgtaacttggattctgcacctatgagtaaagaatgctttactgagataataaaaagggttaaatcattattcattagaatataaagcatatcatttacgaaacttacataaaacatgtaattaaacattactagcatctttatttctaaattaaattttaatattttattttaatttttttatcaattattaaaaatatactgatattgcaatataaattatttattataaatttaaaatataatttacatattttaaaaaatatttattagttataaattttaattataatataatttatatatttaaaagtatatacgtgttataaaatttaattatataaaataaattttaataatgtatattgcacacattaaaatactagtacactctaaatgaattctacacaatgcattttaaacataggttaattaaacgatctagacatgaatattttatttaaatagggatataaaatatctaatcctaactgtaggttgtggttaaagagatgagctcgtgggctgcaccttgtttactcaactttcccaaaaaaatatttgccgtatataactaattaaatattgaaagaggttataaaattgatttgatggtgatgaagagaagggggaggtgagtttgatttttttaaaaaattaaaaaattaataataattatttactaataaaaaataattaatattcagatgaaccaaataggtactaaaatgggtataataaaattgaattacgtggcaatgtcatagatctgggcaacgttatattgattaattatttctgtataaatctaaatcaacatcatctagtacttttacatttttttttcactttttatcatttttttagtaatagttgttcgtaacaattaattattttgtgatatttttataaaatttttacctgcatttgactattaataatgcactaatattgaaataaaaatctttataagaatttacctagaaacatcacatgtatgcaatttatcaagatcatgcatgctaactaggaaatataatttttcccgtattcttcgataatgatcaatcacaggacattaggcaattgtgattcgaaattgatatcattttatatatattttttatctggtattttctatctctttgtttatcttattaattgttaatttatctataatttattttatgtatttattatattctttgaagaattgtatttattataaattaaaaaagagagatcaaccgtctatttattataatttatctatcatttattatgctttatttttttttcaatttcactataaatacgtaaaatagttaaaaattaagtaaaaataagtatataagtaactaaataggagttaatatcatagttttttaaaataataattaaaatggaacatttttttcctatataaaaagttaacgcttaattaaaaaatctgaaccaatgacaatataagaagttctgttttttttcttatctcaccttcctctgtgtaagagtcacagctagatatctcttccttaaagaaacgttgactaagagtactccatggtttgcttacagcgcttgtgatatgattgaaattaaagtgttgtctaaggtatgctgttaaaactattagtctattacgtctctcacaatctctcttttccccttctctcaataactacgaaactaataatcttatcacttcaaatgaattatcttattaatttatagtattcattgtaaaacaattaagaatgttttgataaaaaaaataattcatacaagagagaacttaatgaagaatcgtattagaaaaacaagtaatttcaaaaaacagtcttacatgtaagaacagagtagtatggactagtatatatttttttaaatttttacgttgagctcttaaacaacaataatccttattgccttgatcactttgttcattaattgtaataatggaaataatttatttgcatggttagaagggaaattgatggaacaccccatctctataagaatcaaaaaaggatctaagattggtctatggcatgccctaagcgttcatgagctgtgggattctgtgacgatatgattgagataaagaaatagagattagaaaaaacgtgccttttgccttttcatgaccaccaagagatccaaattgacacatcacgcggctattcaagttcacaaaaagtagccacaagattacgttttgatttgaactttaaagggtaacctttcagagccttatctacgtgagatttgtccataattttccctatttgatttacatgccgacgtacaattttgtatccgtaaggcgtcttgtctcccaagagggtgctataggtttgtattttactctactgttcattttcaaatcttcattttctacataattaattccttcaaatttgtctccattatgtagcagctagtcatgatctttcttacagaaacatgtattcaataattcaaaaattcatttcacgagttctctctattttgattttggtattgacatatatgtctcatgaaatattttgagactaacgaaaggttgcataccactttaattaaagtaagcaactgtttgaatacctgaaaaaatatactatgtccttatatgagttttgtttacgaagaaatattccaattagtttaatcatgcacttataaaaaattatatcaaaatcattattaacgtgacatgcataatattgtttataagacttttgattcagaaataaaacttaaaaaaaacaccgtgtctaactggaaaatgatataagtgtaatatgtttattgatataacttttgcttaataaaaataaaattgttaacataaaaatatgaatttaagaatgtattattctaatatatgatgtgtgagtagtaaaaaaaaaaaatcaatataattgtttatcaatgttttttttagaataagatatcattagattcaaaagtcattagactaatctatcaagaaaatagagtatcaattaaggaaaaattcatctctataggtgttgttgttctattcacataaccagaaattgaatttctagcgtatactcagatgactcacactatttgtcacttgtatcacaccttgtaagtataattaattgtttattaaaagatacattatattgttagttataaacatttgatatctatataatacaaataatttaatttattttaagtaaaaattatatcaatagaagcaaagttgaggcacaaataattattttcactgagatattaatttgtaggttggtttatatcttaggatatggtaagtctagtccaaattagtaatttttttggggtcacaatattggtggacattcactaattttgttataactaatttatgttggaacttggattatcacttttaacatgatctcttcttttgtttttcattcataaaattcaaactaacaataacatgttattagtctaaattagtaattacttcctccatctcaaaataatcgtcatgtaaaaaaaataaaattgtttaacaataattattatgttagcttttcaatataactattaattatatttttttatttataccccttataatattaatgatataaacaataaaaataaaaaatgaattaataataataaagttaattttataaaattattgttatctttcatatatttattagattttaccggtatatgtgaaatttaagatgacaattataatggaaaggatggtgtaatatatatgaaataattatttaattaacataaaaattaaaaacttttaggtgttgtcattttaagagcaaggattggtgatcggggatgttgccccaagcaatggtgaagctggagctcaagttgttaatatatatataagttctaacccaagcaaaatataatatgaacaagataaattcaacatagccataattaaatacccccaataatataatctgtctgttcctttagtgaccccttaatcaaattaaaagaatcattggccatgaaattcatgcaaaactagtaatgattcacaatataacctaggttgattataatattatgacactttgtcatgcatgtttacatactttgatgaatgtgatccaatgaacatatcttattttgaaataacccggccaaaatatcttaatattttccttgttgatctctgagttaatttggatgacgaacaaatatccattgaaaggggcatcggtcgacatcatcatatagttatggctaatgggaggattcattatatatgacctttctgaacactcaaggtagactagctagcatcttatcattattattgtaggtcaacccatacagaggccaactaagtagttcatatgctaccacttggcatcatatggtagcctttgtatcatttagaatccaggtggtccaaatgctaacacattaattttataattagtacatagtagtaataaatcaccaaaactaatcaggcattttgttttttggaatttaagcatcttttgttgagctggatcagccaacgcacaatctgctaaccatttgtggtgacattcagcacggaatatatgaaaatatttaatttatttgtagatagcattatatataattaattacctaaaatttgtatcttatttgttatataatatagaaatttgaattttaaaatgaaatagaaacacttaattacttattgtaatttgaatgatcggaatatgattatttaaataactaatataattaaataaaaataattataactaaaatttaaataaaatttaaatgaaataaatttagttaattgatcagagtgctttatgaaaataaatatgatttgatgatataaatttatgtataacactgacatgttgacctaatctgcctatggtttgtttcatataatatatagtttaattatgaatataataattgttgttgttattattctttaatcaatgaagatatagataatgcaataagcatgtcaagcacattgaagactactgattaagacggctctactgtagatttatattattttattgtaaatgaatgaatcatcttattgtaggcaagaaaacatgctttagctaatcaatggacttaggaacttattgaaactttgaatgtaaccagtttggagacacaactcatatatatgttatttgtgacattttcttttcaatgctgataatgttatctttcataatggataaagctaattaatatattttttccgctattgttattatggcatgatagctggttaattgtttttttttttttaaatgatagctggttaattaagttatgcaaaaacttattaattgaaacggccggacatcttattccccacataatgaagattttttttagtgatgcaacaacacaacgaaggtgaatgtatatgttaattaaaaactttaaatatgttttaatttcaattaattcatataaatttaacttcatatgttgtttagatccttaaaaaaaaccctaataaatctcataaatttaaaaatgtaatatagtgatcacccattaagcaaagttttgatcgacttataggttatcatgccaacttagtctttgaccaaacatggctattaattggtagtcatggctgaaaatacaaaaaacagtttccatttctaattttctttatgtaatttaaaataaacaacgagaaaattaaatataatagtaagtaaaggaaaaataacacaaaaaaataacgtatgtgaagtcggtactctcttcactttccttgattatacctcttattgtttttcattgctcttaagaaagtcattgctattttaaatataatacaaagaaattttttacaggggctaagggtgagaaaaaaaatgtgttatgggtgaactggaatgttgtatgttatccaattgagaagggtggacttggaataaaaaacttagagcttttcaatgaggctcttttagggaaattacttaggaggcttttgagtggtgaaaagtgtctttggagagatatgttcatggaaaaatttggtattagtaacttggagggtcttgtgagagtgtgttatgaaaaaaaaagggtccctataatggtgtgatcttatgagttgttgtgagatttttgaaaaagaccttgggtggtttcaagagaatattgtgagagaagtggggtttgtgagtgaggtgagcttttgacactctagctggataggggaggaaagcttatgttctaagctaagtagggtgtatctaaatttcgaggagaagtagaaaagtatcttatggaggtggtatgaggggagatggtgttgtgaattatcatggagaagggcatgattccaatgggaccttccattagttcaacaattgtaacatcattaatgactttcaaccaagtatggatcgaagaataggtctggttggaaattaaatgatggaaaaaaagtatgtgataaaggaggtataatgccttacatagagaaggaaattcggatgatgaaatttttttcaaatacctttttaagatgtctatcccttcaaagattaaagggttgataaggagagtggctcacaatagaatccaacctatggataacttgaagaaaaatattattcctattttgaagattttttttgttgcttattctggaatttctctccctaaaataatcattccttaacagttttttttttttaattcaaacagttttttttagctaaatttcctcaatggagtattccttgacaacttcttagtttcttgcttttggaaaactaaaaatcttcaaaatactcacatcttgctcttcattgcatgtccatcaactttacttgaattgttcacttggtttgcatcactattttgtcatataatatctttgcttttagaacatgtttcaaagcaaatttaagactttttttttcttttattgcatggcatatgctaattctgaaaaatgtagatatgttgaagtttttaattcagtttgcatcttgacatgtttcctgatcacatgtagcttttgattttacaatcctttgataacctttctattatttttttcatcttatttttttttaagcattttgatttcgtcttatgatcatacacgactcttaatcctgttgcactctaatcaggcatgtttaatttggtatgcttatgaatgttgtccttatgataatgttgccttttaggcgcaaactttctataataatttaaatcttttgaattaaatatatttttaatcgctgtaaatttataaactttttttaaaatttgattcttataattttttttttaagcttgatatttcattcacaaagaaaatggttgaaagccttagataataggttctaattggtgagggatgtccttaatccaaaatctttctttacactcaaaagaaaaatgagccatgaaatctgtgactctactagctgatctgtgaacaaaaaccagagaattggagaatctagaattcacaaaactagagcaatccttaactacaatatccaaataattgttcccaacaaccttttccctctaccaaagcaatctataagaaaacttcagatttatgagtcttttatttatttatttatagtgtttaatttttttatttttatttgacttaaaattttatctcacatttgtattctaacacgtttgttaattcgattcaatctggacggagagaaaggaaaggttagtaacaggatcagcatcccatctgaacgcgatagcttccgcaatgtgcagatcataacagttacaaaaaattcaccacagtgatcccaaaaaacaaaccttaaaattagcctttatgaaaccaccgcttaagaatctgcttgccttctccagaggataattcttcttttggaaaaaccacaggtttcgttggaacccaattgcccaagaactctgcaaatcggccaacaaaataggacctctgacagacgttgattcttcctcccaaatttgagacaaaccatattctccatactttcattatagctaaaaagcgtatgaacaatgtcctcttcctctaactaatccacatattttgcattttttaaattttagtccttctaagaattttttatttatttatagtttatataagttgcatttttaaattttgatttatgtaattacaaatttattagaattaaaaatgaacaaaaaaattacaagaaccaaaattaaaaataaaaaacgtatacatatatcaaaattaaaaacatacaaacttataaaaactaaaaatatattcatacttttttttttttttactttttacgtttttttagatagttctcttttagtgatgatcaaatactaaatatgaatatatatctttcctttaaaaatttgattcagtgtgtgttgaggatagattagtgttttccttaaatatcaagtattctaactcaagtctcttcccctatattaaactttaacacttaagtaaatagttatcaataaaagagttatagttctaattgcagaaattatatttagattttgaatttaagtttttcgtttaacttcatattttgttttataataactagattacatttttttttaccatcaaaagggttattttaatgattattatttttgcatctatctgcagattcacttattaaatgttgagaaaatatgtctttgattacattattcccgttcttgcagtctgcatttggtcgaggaatcttgtgatgttcttgattgagcatggcgcacaaaaaatatatattcccaacctagaagtcaactaaatatatataatacatgtgtagaaaaaattaattaaatcatatagaatcttttctgtagaatctacttgtgattcttattgtacggtcgctgcctgctcaatattctatcatatcaagctctgttaactttttttattactgcaagctctcctaacttgaacaataacaattatatcaaatttgtttttagaaactattgtcacaatatatggtaaactcgtatgaattattgtaaaagaatcatataaattattataaaaagtcattaaaagacaaaatactgtaagtgcaatcaattatggcaatttggtttcgtctaaaatgatgagatatactacttccgatctctctctctctctcttcataaaaaacaagtttaattttagtttaatatatactgaaatttgtttcttataaatcggagggagtactttagagagtaaaatatattcatcattgttgattaaaaaatcagttatgcagaattgtgaccaaattatatatatatatatataaaattaattaattaattatactttcaattattgatttttttaaattaaaagtagttattattgtattttatcccttatagtgattccttgctaaaataaaacgaatgcttaaacgagagatgcattttggagaataaaatgtactaacatttattattaaaaagtcgtttgaaaattatgataaaataaaatacatatataaaaaaaacataaagttaattacaatatcaatcattaattttttaattaataattgccattatattttatcttctagagtatatttatctctagatgagttaagtcctagtttttgtgatggatttttctcacgtgcatgtaatactgatttgtttgtagaagcaacccaaaaaatgagttgcatatgcttattttctttcctatgaatcttctcctatattataaattagaacatacaatttggagaatgagactccatttttacccttctatcgattagacatactcgatcttttccattttctcccttttaatgtgcttttcacacactacacaactagccatagatttctctttcaaatatcataaaataccatagttttctatttatttgtatattttacatttttaactagggtgtaaatagttgaaccgagtcgagcactaaaaatttagacttgtctagtgaaaaagtgacttgctcaaaattaactatttattatttaaaaagtctaatcgaaagcttgacgtacctagccttctttagaaaaaaaagatgtttgagcttgactttgtttaccttatttaaaacttaaatagtttcttatatgaaaattttctttaaatataatttttaattttatcaatcttgtatttaattaatattttaatactagatattaatatgtgctcaaaatatagtataaatctatgtaattttttctccaaaattaatttattttaagagtaactcttcattctagatctgaccattcatattcttaaaattcaatgattataataaataattaattttaacaattaaattttaaaaaaataaatgattaggatgacaagtaattcttttaaaattatctttaaagtaagttaatctctcccctcttatttatatatatatatatatatatatataaatataaatataaatataaatataaaattccaaatttttatttttagctaattttactcccaaaaattaaattcacatattttttccttaacttttaaaaaactcacaaagtttacctttttggtttagctgatgtgataaggtaaaaagttggaggtaaggcttatcaaaaagttaaaaatgagataaaatttgccaaattaatttttcctcaaggattattatgtttgttaaatatggactgcaattgtaaaacaagttttaattaagttaaagtaatttgaaaaaaattataaactgtccaactgaattttatttttcttgaaggttcctagcgggctatttgagtgaagtcgctaaagcaaatcttcaaaagacggagaatgagaattagtacctaccaaaaaaatttatatgaacatttattttgatttaagttaaatagtcatacagcgtgaaataatttcatatggttaattatcttatcacaaatattaatttagaaatattttttaatgtgtaaatgagaatgagaattagtacctaccatatctgcccatctattaccacctcaacacacacatactgacatacataatagggataacatttatcattagtattaacacctctacacatatatgatatgatgtgacattaactcccagtgttaccttaacaaacttctattttttttaatgttaaaatttattaattcaacaattacactttttttttgtgtgttcattaatcatatcgaagtaaaaatttatgatatatcatatatatattattcaaatactccaccactagatcaacctagtgaatatttaaccattacattaaaatttgcctgtgatagattgagtctatataatttcaaataattatacaactaattaatacttcatacaagttaaatatctatgttatctagaacttagaataaataataatatattatatatattattacataatttagcgattagattaataagttttagtatttctaatatataaattatcaaagatgcgtataactttgccaaaagttaaatatttgagttatttattatacaaaatttagtatttatagaaaaattattaaagatgcgtatgaatttgccagatcatacatcttatagacattgatctttttatatataaaaggttcacagataagaaatactagtactttatatgttactcagaggggaaataataatatccttacattagttacacagtgattaaaataaaaaaggtatttacatgtaaaaagactaagtattatgtatttcttaatcattgcaatttataaagaatctataaagcacaatcccagtataaatattctatataacatgcaaataaatcagttgaccataattaaaagtcaaccacatttttttttcatttttttcgacataccaaattctaaacagaaaaaaaaaagtttaatgatggaaatctaatcagatgacacctgatgattgacttctatcaacagcattgctcttttttaaatgcatgacatttcattctcgggcttttctgtttcccgttaactgcttgcacaccattatactatgtgtgcagagtctaatcagataacacctgaacaatgaataaaaaaaataacacctgaacagagttttttttaataaacaaatttatggataatgtataaatgagtccttattaacatccaccctttggggtgaaagaaggtagataaaagagagatagaaagaaaaagagaaaagataaaaagaaaaaagtgacagatgtgataaatgatgaaatagaataaagagaagaagagaagagataaagaaaaaatgaagcaaaagtgagataaaagaaaaagtaaatatataactatcaattttctaaataaattttttaaaaagagataacatctccatgaaaaggtcttcaattttaaagaatatttacacaagaacagattttcaacctgattttctcttcaaaaatgtttttttatataatttctatgagatattttttgatatttccttaatttttgaataatactattggatttgattgaataaaattttaatgtttgaaagtaaatatattgaattttcttaattaattgttggtgatgtacatcatgtttaatcgtagtcatttaggcaagattatatgaaaggttagaggagctgtcatttggaattaagaactctggtgatatatatgaatttctatctttcagcaggcacacaaagataagttcattttaaaggaatcttttccatcttaataaatattttacacgcaaatagtttatattaactcaaataaacttaattaatcaaaataatattctctaaaatgtttcttaatcatccttaaatgctcgttgacttttagaacatccttcaaataatcccctggtttcaagttttgaagtttgatccttttcttaatttttgtatagttttatctcgtaaaatgtctacttcacaaccttgtttatgttatcttgcttgctaaaattatgataaaatgagtggtgctgttttttgatgctagaacaatgcaagcactaaaacaatttaaaaaatttgacttaaacaaaccaagttataataaaaccgtacgtgcacttgaatttgtcacaaactgttggtccaataacctttgtcaccagccaattcgtaaataaaattgaaaagaaatttatccgaatacatttttttttttgtcatggaacattaaaaaatttgaagaatcaaagccaagtgatcaaaaccaaaacaagtcaatttattgtaaaagtatatacttgtcctttaacataagctccttagaaaaggaattttgaggaatcgtggtagaataagctatccaatatttctatcaacttcatccccttttaataaaataaaataaagagtaatttttttttttaaaaaggaggaaatttgattccccatttcccagactctacgttgatttccaacaaaaatagtgtcatctttattattattgctatcaattaataatgaaagcaacaaagctaagcaaagagggtgtgaagattttgtccccccctccccccccaaataaaaatgtcttactggtgactcttcataagaatctgttacccccattaaatcaatgtgcaacttgatctgcaacttgcagtgctcttttactttgaaaatatgaatgtgcataaattcctctgcttatatgcacaaaaaagtacccatcccattttgtgcctaactaatggtttttattttttgttgcatcttattttatttaatagtaaaaggccacaacatcatgtccaccaaaagttttggacagggtcatgatcagtgccacaaagcacaaattcactaattattatgatataattcgcagataatcatgcttattaaacatatttaggtattcagtttttagataagtgtatagaagaacgtttattgagagaggtcaacttttataaagattttaatgtttcgataaattaacttataattcttggcttgaggatattttagattaaaaagaaaaagtttaaattcagacaaaaggcacaagaaccataaaagtaggagaggaaacaaagtaagaccacttagttgccggcgttgggcaatgacaccccaattttatgccttaaattgttgtcctacccgtgagtgagtttgacttgaaattcaagttctaaacattttttatactccaaaatactacaatcttcacactgagtgagattaccttgtacttgctaactccacgacaaatttccaccacttgaacattaaaacatagatttccacatatccatttaatgtggtccttgaacaaatagaaactccgcattatatcaattggtcaaactctgccccatgagtgattgatcttgtgatctgaattgctagtgactccacgtttgttacgatccccatcttattttaagcaaacaatatttgatagttgagatctttcctagtacaatgccaacggggagaggtgtactttttcttttattttattttgtcccatgtataagtataagtagaaggagagggaaaagttgaattaacagagtagcaagttttcaaggtgtgaggatcatgaaattaatacttgatagtgaaaccaactccagtctctatctatgcaatcccaaaaaacaaaataaaaactgattgtcacttagaaacagctaaaagggacttctttaaatatactattgcctaatcaaattctaaaaataactcttgataattaatttctttgactaaatctcttacatataataatgttgtcaattaggcataggttgaagtgccatggcagtgcaatgataggaccgaagatcttagtttagtaacaaggaaccaaatacagctagctaagcctttgcttcaatttatgtggggtgagaagaaaacgcattattttatatccactgatacattaaagttacaacaacgtgcaattcgttcccaaaataagtgtcaggctggctgctatacataaatagaagctcctaattctcaagtcaatgttaagtttcaatatattaagaaattcttaagcttcagaataattctggttttactttaattctttttctcatatagatatttctcttttccattttctattgatcatataatttgccaaaatacaactccaaatagagtaggcagattctctaaagcttgttgtagcttatataatgacttcttttagagaacatgaacaaaggaagagaagaagagagagaggacaaaaggtgaatgtattgaggtagaaaaaagagaggaacagacaagtcaatagtaataagcataaatcatgaaatgagggcctattctcttcttctgtgcaaagctgaacaaaaaaagagtacgttacagaaataatggttactcctcctggacaccccattttcctacttccaatgacattcaatgccctgcaagatgtaattgaattttactggaaatagcagaagtccttagaggagaggcatataccccagtgaatttttcttaaggacaaaacttaggtgcagcagtaacttacgtgcttttagtattattttttaaaatcaaaattgaagtttcacatgggtaacttatactattttttttcctatgtaaacttgtattatgcaaattaccgagataaaactctaattttaatttgaaaataacaaaaaaaaaaaacacttaaggaactgcatctaatgttatctaaaaatcataaaataaaaatgctatcctctgtctctaccctactgccctatacagttaaagacaaatttacgaaacatcttatcctcttctcttcagtttttgtttttctctttaaggaagttgatgaattttaaaccaatcactgttcattttcatctgagtcagcgagcagcaaagaatcttcattgctttcatgtttgagtggcttctctggatcaacctcacggctctgatcaacaccagaagctgctcctcccattcctgtgagtttcttggctctttgagcctcgaattcccaatcagttctacaaagaaccaccaacatggtcactgcgcaagacccttgagctgcaagaaggccaagccagagcccttgaaagtcatagccagtgaaaaaggccagccaaatggacacaggcattcccacaagatagaagcatcccaagttgatgttagcaccaactttaggccttgctgtgcctctcagcaccccacaccctgttgtttgagggcaattcccaagctcacaaagaccaattataggtaacaccatagatgtcaaagttataatatccttgtcctttgtgaacatgctagcccatgtgttcctaaccatgagagcaaaaaccaatgccaagacacctgacatgaagctgcaagacaaccccacaatggcagaaagccttgcctttgagggcttttgtgcaccaagcttgttgccaactcttgttgacacactgaagctcaatgaagaagggaaaatgtaaagcaaagaagtggtttgaatgagaatccccattgaagccacagtagccttggggttcaccaacaaaccacacaacaaaatcatgatctcataccaccaccactccaagcacaccgaaacacagcttggaatggccaaattgagaagagacttccactgtgtgaagcactcaaaggagaaaccaccccatgttttcttgtgagtgccagagaagactatgtaaagaatcaaggaagccacaaggttgaagtttgtcaacaccccaccaagagcaacccctttgattccaagcttgaggtgagccacaaggaaatagttgatgggtatgtgaaggagaatagaaaaacttgcacaaagagtgagagggagagtaatggattgggttctgaggtaaattctcaaagggtgtaggaaggattgtgctatgaggtcaggaatggagtaaacaagatatgattgggcttgtgtggctatggccacatcctggccacaaaggaggagaatttgcttcatgtagagccaaaggagtgatatggggagggaagtgaatagaagaaggagaatggttctttgtaagcagaggccaaggagggtgaatcttttggcaccaaaggcttggccacaaattggttccattcccacagctaggcctgagagaattgaatagccagtgatgtttgcaaagccaatagctagagagccaccagctaaagctagctcaccaagatggccaaggaagagcatggagatcatggagcggcagtagaggaggaggccagtgaggatcattgggatgacaattttggatattgaaaacacttctttgatggcttcagggacatgatggggttttggtgctgttgttgtttttgttgctgttgttgatggtggtggtgtttttgtttttgttgttgtgttgttatgttgatgaggtggtggtggtggtgtggtggtgttttggggtttggagatcaaagggttagtgattgaaattgggcaatcaggaggcgaagtgctgcagcattggcaattgcaagtgacgtcaagagttggatgacacatggtgtgttgtagctactttgtgtccgtgtggaggggaaaaaaatggtattgttttgaatagacttgaaacagagagagagagagagagagaaagatgtgaggattgagaagaaggggttgtgtgtggggttttatataggtgttagagttggaggtcttttcccttttattttatttttttcggtgggagaaacagaacaatatagactttgaatttgtaccttagtccaagaggaaggcttcacattgatttatcatgtgagtttaatcttgagtttcatgagtatgaaaaagagtacaaggagattagtttttcacctggtaggtagggattctatttttttttttttaacttttggtatttaaaagtgaatttaattaaaatatgggttgatagtagtgtttttctaatactactactattatctaatcataagttgcgatggtgatgataaagttattctttttgactagtttagtcacgagtgagtttgaattcgaaaatattttttttatttaattatataattgtttttttaataattactttaaaaatagtatttaaagttatttttaattaattatataaaaaattatactatcaatatatgaaaattaatcttttcacaaattacattccactcaattagctcaagttaagtacaaagggataaagttgtagtgacatctatttcttctctttacaagactttattaattatgccaaatcaagcttcctgtcacttgattaagaagtctttagaaatataacattacataaccgtacatgataattaaattagaaagcatgacatacattacatatcttttaattcaagttgtgtttcttaaatataaattaaaataaacagtgtttatgtccataatttatttaaataattaaaaatatttaaaattgtaattaaaagcaaataattgagaataaaatatattattttaaagggaaatatactaaaataataaaccactcttaaataatgtaaacaactctataaagatatatataaagttggattataattaagcaatatatatatttcaactatttagaatgttgcgtaaaactatatataattttttttcccttttggatgggctaaagcgtccaacatcgtccggcctgaaaatatatacaattgtattgcactatccactttggaatttgaagagtaagatttacaggttaaaaatttgtgtgtgttttggttctttggaggcctaattgaagtataaatagatcattccaacttgagctgagactaaaagacagaaagagatagaatcatccaaaagagacacagtagaatagattcagagagtttctggactattaagggccaagattacatccagacagaggatatatccttggacataacatacaaggaactaagcaaaagccaaagagcccaatggagttcatccatgtttatgatcttgatatataaggaattgtgtataagcattttggatttgttaatatatatatatattttttaattaatgccaacccatagttgtctgcttcatagctgggcaggttgggacaaagtcacttaagagatagttctatactaagcagtttgaggcatcaagggataccactgtgttttcttgttttgtacttcccacgagattaatccccaaccaaccctcttaagtcttgtctccaacactctccaagctttgtctccacataattaattaattattgaattatattatctacagaatatttttttaatcttttttttagaatatatattctatgtttatcatattactcattttatttcacacttttttcttttttaattgtaaaaaaagctatgtataagttttgtataatttttatttttaactgcttcaattaaggctttttggctcttattaatttggtgagattttgatgtatctttagaagcctccattttttagattgaatatgagattattttttaatttaaaatttagtcacatttaaattttttttacctcttcccaaagaagtgctgtataattaataattctcattagcagttaagtgtgagtgactgctgaatcaaaggttaaccaaggtagcagggataaatgaaaatatatttttttaattctcttgatttagaataacagggaccagttacattttttggcaggaccttatttaatttatctttattcaaaaatctgagtttaatccttgatcttttttttcttcttatttttaattcggttctttttagtctattttggtgaatgtatctttgtctgtcagaaattattttgttgaccatcatcactaaaaccaatatgttgataaaaaaatattaaaacaaaaatatatataaacaatgaagttgagaaaagagataagagtaattctaagtattataatatatatatatatatatatatatatatatatatatatatatatatatatatatattatagtatctgcgacatctagttattttctatgtcttgtgcaactataggtaaaaataaattaaacttggatattcaagctgaaaaagaactttggttaatatacattgagaaaaggttaaattattttagctcaaggataaaaaagaattgaattgtgagcgagcaaactgatataacattggaactttttgcttataacatcattgtctgttaggtttaggaattcaaccggatttgtggtatacatgatgaggtaaatagagaatggcatggttctaccattaatgacgaaaatcttgaggcatttggagccgaaatgctacttgacatcttgccattataaggtgtagattgtgactgcaagagtgttagtaagaccctcttatcaatacatttggttaaaaatttattgaaatttgtataattatgggtgatgaatatctttttatgtctcttattgagtttttgctctgttatttcctcttttttgttcttatgaaataaatatctttccatatgcagtattcgaccaggaatgacatcgcataccaaattaaaatgagaataatatatgaattttataacaagatggccaatgcatacaatgatccagctctgatgccaatgaaatattctgaaagatctgatagtcacacatctagatctccacttcttcgttgttcagagaatagttcatagcaattgtaaaatattttctggaaatcatcaactgtatatgtaattgtaaacttttacatttaattgttaaatttgatgagataacgtttggttgagaaaattcttctccccctctttttattgattaatcattgaaaaaaactcattgttaaatttgatttctttcgtttaattgtccattaatcaaatgttaagaatgaaactatagtagattatatagtatttgttttgagtacaataatcaacctgtgatataatgaattgtaaaatatataatattggttataaaaataattaataaatattagagattaaaaaatctgatgaaataattaaaatttaaaatactgtttagttatttctggaacttttaaaaagtgttagaaaattcaaaaattgaatacagtagtatccacatccactttgtgatagtttttaatatatgccacaaatttattggaaaacaatatcaacattcaaataggaatcatcacaaattgtcattgatatctgtaatcctaacaattaatcttgagtatctcaaatgtattttgtgaatggattctgtgacggtttttaatttaaaaaatgtcattttaatcatcagaaatgtcatattttgtttactatccttttgcatcacgtactaaattaaacctcgttaactatgacttatatgtacttgatttaattaactatgatgaaatgtaaaaaaattagctatgattgtgaatttattaatcttggtttcaattccaattataacattttcctctttaatccaagcttcataaaatttagtactacaaaaaaaaaaatactataaacgatgagttaaaagtatgaaactaatcccctaaaattgtgtataaattaaaattagttttcgatcaaaagcttgcacacgtcactcgtggaacaagtttcaaactttgctccctcagtgtgagcaaatactagcatcccaaataaaaacaataataagaaaaagaaacatgctgcatgcattttgaacaaaggcgactttcatgcgtgcagtacaataaaaaaatagaatcatataactttaatgttataaaatgtacaaatacataaaatgtactagtgtcctaaagaaaaaaaaaatgtacaaaaatataaatttattgttgactgataaaagaattatattaacgcgcgttcttacgccctttttacaatactctttaatttttttttcttttatatatctttttttatcacattatctatcatactatttttatcgctcctaattataaaatgagtcggaataaaatttgtcataaataagtcacggttcaacagcagtaggtgcattagctttttttcttcattggtggatttgtcatttttgtagggcaagatttatgcacgaacctatgttaaaaaaagtatgggtaggagcccacagaaagccagaatatataataataaggaaaatgcagtgatcgtattactactctcacaaggtgtagaaattaatttccccaaaagttacattggcgaagaatcatttacatatgtaattcattaaactcacaatgactagaatgtttgagtttctacaccgcttttgttagttgataatactttgcccatggattctagtgtcaccatctttgtggcagttattaggccactttatatatgcttcccttttttaaaaatctttttctttatttttttagcttgttttgtgtgaaaatttgttatttgatttagaaaactgtgctttcggtgctaccccttttgaagatttggaaaactccctaattaatgaggaaacgaagaccttggatgggactttagcatcaaagtttgaagaacaatacccaagttaaggagcaggaaaaaggttgtagatcgagggagacacgaatgaactattggaggggacataaaaggtattgaaataagaaaacaatgaccgactgttaattagtttgaataggaaaagttcgattttttttgcttaaattaaatcttgagattgagtttgagtgttccttataagttcaaataaaattttgtttctcattaaaaaaaatgaattcagattttatgaatggaaaaagtaaacactaaattagttgtctattaagtggatccacatatattagttaatttgaatctaaaacaacttttgaatatgttattaggagctttagatccgaagaaaaaataggaaaacaagataccatgcacaagatgcaagacatgcatgcaatggcaggatatcaaattcagggatagaattaaagaaaacaaatttcgatgcatcatgcatttttccaaattaatccaatgcatatatatatatatatatatatatacgactttctttacgatgtattttttatatactccatgtataattgacaaaatattaattcacactaaatgccaagcttaataaattttcatttttaatatctttgaacgaatattaaatttatcaatctatgattctaattacagtatacatcaattttctgatatataatgggatgtatcgagtgaaaaaacattaatcacataattaaatataaaattttaagattatttgtatttaaatataattatctatatataattatatatgtagataaagttaattattcacatttatcatatacgcgtgactgtgtgtgtgtttgatattacatagtttatttagctgcgttcaagaaatcaaccaatcaagcatggaaaacgatacattattccctatattgaacggacacagcacactagcttagttagtccaataactacataacatgtttcaatgcacaaaaccactttctcactttgaaaatggcaaaagctgtgagaaatgcgtataatcaactccaatatcttcaaactgaaaatttgaatccatgattgagaatcttgatcagatgcactggtctcgcgaattcatttgttgggcatgcagcagtgggtaggttcaatgagtctttcaacaacaaaccacacttctttttgattattctgttgttgactatgtatccatatgcaatctaagtgaggactttaacactgttagtattctgtgaaagctgaagcgcatgcatatttgatatccgttattctccacgtaagtattttttttttcttataactatttatatgtgctgaatctaaaacacttcattataaaattaattaatcagaactttacacacttctaacagaccacatatatttaacagataattaatcttaaaagtagtatatctaaaacctgtaaaagcataccttatcaatcacatcccctttttgcttgctaaagtgtattggttggatcaataagactagctagcaagtagcaacagtgatctatacgtacgggatagggaacctagcatccgatttttatgaatgaaactagtaagtgatacatctatgatctaacaaccacacaaatcttaggagtcataaggtttatctttattgcacatgatatatcccttcctttgtcaaccttacaaaaattctctaatttttggacttttgttacatcgattatccctcttaggtgtaagttattacactaatcctccctctttgacataaaaaatgttaggccgaccatctgttgaaagactcatagtgtagtgtaaaagcatgaaaatatatggagtgtaataagagtaaatttcagaaagaattcatataatttactcaaaaataaataaccaataatagaaaaatttcattaaaaatgaccaacttgatttttcttgccaatctagtacttaattattcacatgatagatattcagatctatcatataacaatgataataaatttgctgattaacttttgttcaaatcatgatttggtgaaaatcaacaccatatcattaattaattacactatacaacacatatttacaattaagttcaatcgtaaaaatacaatgtgattataaatccatttgtgaatacagtggaccacttgttattaacatcatctctcgccgcacacccaaccccacgccatataataattaattcattgatcaaagaccaactaaggtaaagcaataccagaaaattatagcatctcttaatttcaaactaaagagaagtagaatacttattatattcttcctcagttttgtgactatatatatatgtttaatttgaagaaatatatggtgaaagaaaaacaatctagaagtatgtcaagagttagcatgctttaatttgtacgagaatctttacgacaacaacttaagccatcatcacttttcaaaagcaaatcgatttctaaataacaagggataaaccttctttaatcatatagttaattaatggcatgatttacaaaaatcacaatcgtaagggtccatagggaccacatcttaattaattacatatccttcaaagtacgacaaaactatattcaagcactgactactttaattttcttggcgtcacacgtgcagattggatgccataaatcaggtgtgcgtaaattcagatcagtggtcaaaaataacgaccaacgatctggttttaaattttgcatgtgggtacatatgtggatcaatcttttaccataaaaatatttgggacgtcgacgacggtcatatcgtttgtgttacccgagagaattgatgcaaatgaaaagatatcccaagaattctcttcgtagatgatgtatatgcttattgaaagatttgatcatagttaataacaaaatggaatggttcaaacatatatatttaggaagcatgttttgtgtcacaaattcataggtgaagggtcaagggatgttatcaaagatttcattaatttcttaaactttctgtctaattgtcatcgtgcacatctttctccctctaacgtagcttttatcgtttgcttttactgataatattacttacaagattatcatctatccaaaccactttgttgactttgtcgtcgtcttcagtaaagccatttttcacgccactttgctgttttttgtcttgtgagaaaaaaacaattttcccatttgtttgttactagcagaaaaagttagtgaaagattattccaattggtttatattcgcattttttgagaaattatactatctttttctacctcaaaatatacaataaaaaagattataaaacatatgagcaagaagagtgcagtaaataaaaaagagaaagaagagtgataggcacaagatattctaagctatcactactccttatcattctaccaaaactaagaaaaaacataacaattttgattttttcattgattgatcctaataggtaaagggaatacatttatgtgatcccagatgatattaatctatagacaatatttatccaaatgtcaatatcatttattataggcataaataaaataaaactataagttatagatatctaattccattctatataatctttgacccacttaagcatctttcttttgggtctctttgagcccatcttataaaaaagactgtgaaaaaaattattcacctgataaagagaaacgaaaaaataatattatacaaaaatataagtatatgaattaataatataattttttatttttatttcctttcggtgattgatttgtatcgtaggaaataacattttgtgatgttttttttacagtgctagttttctaattagtgtaagtttggttttcagtattttatttttatagcattttggataataaagaattatttttcttcttaaactttcatttgaagcgaagaggaagatttttttcttgattgttgtaaaaccatagaattcccactttcaagaaatacatctttaatttagggttattttttaattgcagacacaaagtgactacaacatacatcttggttagagtaattgtcacaaccacataataaggtttcaatggccaacgacaatgactacatttaactgcaacaaccataacatgatcctgattccaccgtctgaaccatattaaaacatttaatccaagcattaaaaaaataaaaatttaatgtcacttttaatcaattaaattttgttataatttatttgatatattaatttttaatgttgatttcaaaatgttttagtttggtatttttaaaaattttctgttaaaaagattaatgttctgtttattttttaattttaaaataatcacaaataaaaattattactaactttattttattttaaaaattaaaaattattaagaaaattcatcacctccctttctcttctctcaagcacttggcaacctcaagccattcatggagtgacatcacgtgcaatggtgtgcagctctcgtaatcctttgtcttcaccagtgatggatcctcttctatcacgacgttgttttggtgccttctccttctcctttgctgttgccaccgccatctacgacaatctgccgccgctgctcatcacctatgccaccttccttggttgctatggcttgagtttgattactacttgtcaatgcggaaatcaaatgcaaatgtaaatggaaaatgcacgtgcaatgcaaatgaaattgaaaaatcagaaaatataaattgccataataattataagtgaattaccataattataaaactcctactcatgaaatataaattattctatagtggtaaattttacaaaaattacagtaattaggtgatctaaaggtaaattattctatacgactaaaaaagccgtcacaagccaacgtataacctagggctactctgtggatgtagcagttttttcctggggagttatgactaatttttttcttctagaagtagctcttcggggaaaataatttaaagtagtcatatatcactaattactgtaatttctaacattgaccatcgatttatatattgcatatatattttaacgatcttttagaccaatatatatatacatgcatggctggatgagactccaactttggactcttcatggtagaaaattactccctttagaatctgactcacatttggatttaattccaatagtccacctgatattgtcgtgttaggaatcagtctacaacgaataacattcctctcatccacactgcagcaatgtaccaaaagcaaagtttatgctgttttgggattccaaccaaaaccttgattcacgtgggtgtgtagataaactgatatataattcaatgcagatcgctaaaattaatttgaataaactgataactaattaaatgaaaaaagaaaaattattaaattagtttttgaatctaattttaaaggttatttcaatccaattcaaatatatatatatatatatatatataactcatattatatgtataaatttataaaattttcaattcttcatatttttactatcttgaaaatgtttttattaggattggaaatatttaattttgtcctaactcatttaattttgatcagattattttttaaaataaagaaagtaaaaaacatcaattttttttgctattcgagttggaagaaaaaccaaaaaatgatagtttgtttttctcccttttagtcatacaatagaaattaaataaccttttgcacttcacaaaataggagagaaataaaattcaataataatatttaaaaaaagatagaagttaattcgtgtcaggcaaagaaaagaagaaaaggaggaatacttttaagtctcgtatcagagaagttctaattctctggagttgatgtgattacaacaattatgttaagtcattgtatataataaaaacggtgagatattgagtattttcagagttcgatgacaaattatcaattcataaaatcaactactaattagaataatagacagaatttgtaatgatatctatgatttactaaagaataatagtaataaaaatcaacacaatgttttttgttttcctattatagcaacaaattatcaaacaagaggctaaaacttttggattcaattattcaagatatgttagagactaaaatgagattaatatgaattagttgtgtactttgtttgtcaaagtaactagattaattaatcaaatcctaatttttaagataaataaatctttatttttaattaaaggctctgattctttgtgtgaattcaaagacgaactaacattacaatcaagaatccttaattgatagcaagtattcaataaccatttttagtctaaattaaagtattgtaaggttcaaatattattaatagagcagatttatacatcaaattgtcgttcaatatcggagattattgatcaggttttagaaagcatgaacaacagggacaattgaacacaaaaatgaaagaaaccaaataaataaatcaaatcaagaattcacaagatccatcgaaacccactcaactccaaccagggatagtgtagttagacatgaaaataaaccaagatatataaaagaaaataaaaacttttagatagttaatatatgaaacttgagcttccacctttattgccttctcttatcatagtatttagaaaatgagaaaccccaatagacaaattcaaaatgttacacttatggtcccatacaatgcatgcatctctcctttttgcattctagtatgtttgatgctccacagtggttccccggcccagtgttctgattataataattaatgttgttttttctttctctttttctcatagtttcaagttttatccttcactctaacacttgatccatcaaaatgtgataattggaacacaaaatattctcaaatcacaaccaagatcaggcaaataacttcagtcgattaacatgtgccatctttactaaatttagaattcttaaaggtacaaacaatgtcaaaattaagatgaatataattggctaaacccgttaaaaagcatatgaatagtagataatattcaatattatgaaaaattgctctccatatatttaggtagagccctagagctgggaactaattgagtcaaattaaaacctggcttaattagcttggttgcggtcaataagtattaatttactttaaacttgagttcagttttatattaaattagtttccgttcgaccccatttgattttgttttcaaacttgtgaactcaagtacttaactttataaatatcaattagttagagtgtttggatagagaattttaattgaaaaaaataatttatcaaagaatttgaatttctgtaatctagaattcattgtttggatactttttatgaataatttaaaattttggaattttaaaataaaattttaaacaattaaaaatctggaatttcaatttctttctaaaaggtgagaaattgagattctcttcttacagttttagaaacacagctcctaaaatatcgatcgggtatgagcatagattcattttattcattctcataattttactttttttttatccaaacataaagttttaaaaataaaataatttcaattgaaatatttgaaattcttagaatttaaaatttttcaaaattttaaattttttcatccaaacacattcttagccctttttttctaaaaaaacaaaggtggtatatgaaaaaaaaacactgactgatttggacaaaatcaaggattaacataaagaactttaaaggcaaataactaaagtgatatatagacccaaatgttaaactgtaacaacttcatactaattaatttacatattcaattatcctacatattgtgtttattattatataaacaaaagtgtacattattttgacaaactaccagtcaagtaaccgttttccccacaaagaagatgtgaaagggcataatcaagtatgactaagacgaaagaaaagggacccaactgtcgtggggcaaagctcgttgagtttgtcgataaaaccctctgttaattggcaaccgaaacttttgttgaggatatataagctgcggagaaaactaagacgatgtagagtctaatattatgttatattttattttaaaatcaattgatattaagtgaagttgtccaacaaatatataaactgcattccaagtgaaattgttcaacaaatatataaactgcattccagagattgatacagacgatgtgaaactttgacataaaccttttcacatgtgttcccatacatgtttcatttagcaccaatatatatatatatttcgagtcttgcttaaagattagattccaatttgtctaatttagggctgtagagttgaatggagacttggaaagaaaaggtttatacgactctatcgatgtgtcattaagttcagaaaagaacgtacagatcaaattttgtcctaatgttgtcatcaagttatcggcacttcactttaattttcacattgttactttattatttaattaatttgtaacctttattttcacattttttctttactatttaatttatataaagctaaaatgcactcttagtctctctcttttttttgttttagtttgattctgtatacaaatttaaaaagtttcaatgatcccttgaaatagtcattttgattatattaaattgactattatgttaattttttacatcaacaatattaattttgattaacgtattaaatgtccatctgataaaatatttctcacattttatcatagttttgatccattggtctaaagttttttcctactccctgccatgcatgatagttatagatagctatcttgtgttagttttgatacctaaattatgaaccactaatttgaatcattgatattcattttatattttggtttcagtttaatcttataagcttaaaatattctgttttggtcgttctttaaagtgtctatgttatataaaattggtccttacgttagtttttttttaatagcatgactattgtgacaaaagtccatctaatatgacattacatttatcacattttattgtgtgttaccatgttaaaaaaattaatatgataaattgaaaaaaaaaaggaatcaaaattatattttagcttttatttgttataggaaaggatagttacactagcattctataagatttagcatgcttcttgtttcagaacaattacaaatgtcactcattgttattcgtcaaagaacatatatataaatatttttaagaataaatataatcattcaaacaatttttagtcatttctaaaaatacaaactcatgcataaaaaaatttatatgaaacttgttattcatatgattcataattttctaggcataaaaaatttcttgctaccaaacccttccttaatacaaatttgcattttataagaaatgctctttgatcttttacataaaaaaaaacaaataaagatatttttttcctaattataagaaataattttcttttatatccttcatttactataaattctacctatcaaattaattattgatatttattgataaaaaaactataaagcatccaaagggagacacggtcatggttttgccatatgttactgcttgtgacagatcccaacccttatttatctgtataatatatatcttctggatttttttttataaaaaaagttaaacatttttagtataagaataatcacaatatttgggatggtatcacgtactggttgtagggaaacacagaccctacctcatcactgttccaggttttttgacatgttagattgagctacgtgaggtggagcatgttatccacactttgtgattattctttctttggccatggaattaataataggaattgaaacgatcgatggacaaggaaagcaagaacatcatatgcgagggtccaactccaacaccaatgaacatcaactaacccaaatagagaggctcaggactcaccatttttgttgcctgaaatctattcaaaaagatatatactctgtagaaaatatatcatcagctgacacctttatatggaaaaaaaacattaataattgaacaaactttattctatcttcttttccatatgtatagaccataaggtagggcctgcaaatcacttcaaaaattgaacttctttctcatgaatatcttttttaaacaacttgaataacagtttctaacgtactctatgtctctatataatttattaaaattcacagtaatagaaatccaaaatttagagaccggtttaaagggaaaaaaatctcaataattatgatggctaattatgagacgaaatcattacatataattttatttgaaagttttgtacgtatatattttaagtgttcaaaagaatctcgttagtatttttctttttagtaattgcaatagagactaattttttaacaaccaaaaaatcaatccctaaatttagatttgacaactgaaaaaccagtccccaagtatttgtttaacaataaaaataaataaataaactttaatctatagtagccaaaattttaatctttaaaaattaagtcaatttaataacagaaaaaataattgttaaatactaattagttactattttctttttgggcttagtagtttagtttctagtcagtgtgattaaaaaaataattgcagaagtggtgaaacttacacaaattttaatcaatgaagaatgaattagaaagaatgtatgacagaatgtacatctaactcttctattttttacgaagcgttccttgcacgatgcaatccatgacagtttttttaaatcacacagttgtacgtgttacgtttttttaactgaatagagataaggtaaaataattttttttactgggaacattgaattagtttagctaactagtaaaaagatggaaatcgatgagtacaagttgataggaaatgtttaaatgagaagaaatttaaagtgaagaatgaaaaaaatttaatttaaaccattagattgtaattaattaaaatgataaaggagattaaactctaacttttaagaaaacttattccaaatgaatgaatgctattattaaaatttcaaatgttttttaacatttgaatatattttatcaattaatgtttaaatatgattcataaatttaatatttataatttttaattacatgataaaaaaacatgagtttaaatgctagcaacagaagcatcataagctattgatgttgtgcaatttgaattgattacaatttgtattttctcactacgcttcccacccacactatttgttgaattctcttaaatttgtgaaatttatttaggcaaaattgtgcaaaaacaatacaatttgttgaattctctttcacaaaatagtgaaatacgatttactaaaaaaggcatcgcatttaatatctaaccacgcatgaagcaagattaaatgctataatatatatatatatatatatatatatatatatatatatatatatatatatatatatatatatataccaaaataaatattgttaggaaaaaaattatttcagaataagtatcatatttaatttttcaatattattactttcatttatatatttattagcttttttatttataaaaaataacccaagacaacacttattttaaaaaacatgaaatccttatataagaaaattacctttaatcataattatatttgaaaaagattgggatacaatgtaaaaagttaaaacaataatgagttggataatacgaaattcttaagacatccagataacttattttattttaaaattattaacaatgatgtattatacaatttcatttgaggtggcctaaatcacaaggccacactcaaatatgtaaagggttgttatttttgtcatagttgaacacaatgattaaaagtgatgacacttgcaaaaactctaatacttttagtaaatgttattctagcataataattggatatatatataagatgagtgttggtacttatagctgagggttgttggcaaaaggatgacggtgaaccatgggtaattattcgctaattatctcatctcttgacaggcatgaaaggcaataagtccttacctacatgtttagccttagataaaccgttagggttaatccttgtgtcttccaaggtacatgatgtgagacaaagcataggataatgttacaagttgctttgatgctttttgagtgggcattacctattgaatacatgattaaaaactagctctaaattaaatgttggtacgctagccaaatctgtaataaatatcatatttgaaagtgttggactttatatgacacctatttgcatgactttatgtcttaaaaatggtttatctttttcaattttgcccaaagtgcgtgaaaatgtttaaaatatttatttaacaatcttaagcctaaatcatttaataataattaccaatgattgatagatcttatgatctaaaaatttagattgagaaaagtcgaattgggctcggcccattatcattagtgtaggttttgttacactatttgtttgtattattgttttgaaaatcaaaccgaatgaatcaatgggttagattatgaatcgatcttgtgattggtcggtactttgaaaattccaacgctttcataaccaatgaaaatcagataaagaccaccgaaaactgttgcaaaaaattggtttgagctagtaattttaataaaatattttttttaattacgtttaatctaaaatattttaaagataaataaaaatatttagcaagctttacaaattggtatagattagtttatcaattattattaatttttatataaaacatataatttagtcatttatattaatttatatttttcatatcttaatttttataattttatattatattaatttgtatttttttcatccaatatgtaatcttgttatttttaattgagattgttgtattttattaaaattcaaacctaagtattatgatatatttgatttatatttttatgtttattttgaatgttaagaacctatgaattgatattttatttttgttgatgtgcttatattaatttcttaattgaattatcgttcataataatagtaatgatatttccttctctaataaaattctataataattataacacaatcttaaataaataaaaaataaagataaaagggttacgaataatcaacatttattttaaagatcacattcaaaagttcaaataagagtgcactaaatggtactaatcacgataatagtggttgattccaatttctataattagaataatcaaaacattaatttcccaaaatcatttcttgattaatctaaactggcaatattaattatgacgataattgttatagcactcaaccaattggtggatatatattgtattgagcttttgttctgaataatagcccatgattagttggagtattcaattgatgctcagagaaatccctaccctcataccatagcttacttgatcgttgtcccattagacaactaattctctctttcatagccaatcgtgattgaggtgagtcttctctcattctagttttctacgtggtttactcaaatttcacgaagaataagacaaataaattctttataccaggtgtgcaaattttatcatcttattcgctctttactcaaatagatggtttataaccgtcgttaaaagtttctattaaccatccttaaaggacttttgtgtagtagtgttattttcatgtgatgatatggtattatcctgtatatatttgatccttttatgcttaggagttagaacttataaaaatcatcaattgctatataattatatgttgctattcttttaatttgatcacaatcgagttaaaggtgcaaataatatgaaccctatgcgaatgaattatcacgtacattgaactacgttcttatcaataactggatgcatatgctttaagatgacttgaactataggtgaatccaaattcgtttttttgggagcttttgtttacaagtgaatgtcgattcatatgtcctatataaactactggttttgatcgagcaaattaagagatcaagactgttcaagatgtagcatgaaaaaccttttttttttgcacagtttcaaattgaatgaaagaactcgttctggtgccttcgatttacaaaattaattgagaccttcttttccattctattgtgtggcttttctcctttaaaattgcattgttttggtgcctattttgaagattgaattagttgcaattttttacctttttttttgcgttttaacacaaaatgattgtgtgtttattaggcagatgctttatgttattagcataatatattattaattaaatatctgaggagggccaaccttaatatggcacccagttgggattaattctaggggttttgttttttgtctatcgtgcttgtttgtatgactgtttctttcactagttcctgtgttgcattcagattttattttagaattgtgctccacttgctcttgaaattgaatgaggaggttataagtggtgcttcaccattatacaacatatgtgagtacttcacgctaattaaccagcgtcaacaagtttaattggagattttagttttcaattattttttcttaattggagattaattgaaaaatgagaactatcttcattcaattttaatttaatatagtataacaaaaaaagcagaacataaaagatgatttaatttaggaatgtattggattatgatttcaaaaaatttaaaagaatatcatcaatttttaacaaacatttaaagttacaaaagttaatagaaaatataacaaaataataataatattcagatgaaaaaagtaaaacaaatacaaattttataatcttttaatacctaattgatgctacctttattattagaaaacatggtttatacgagaaaattgagggagaaatatcaaactcaaactatagttttgaaatgagtaaagtcaggttataagtgctccacttgatacttaaattgaaggaggttattataagtgctggtgaaaagtgtggttaaacgttatactattggttttgaaatgctagtcatacttgttcagcggaaccacttttgccatatatatagagagatacatgaaaaatgtacatattttattggcaaaatcctttattaaacattctctcacacatacacatatatataaagcaaacaatttattggatttgttcagttttctctcagtgtctctgatctccccctatcatgtctttgtattgatatatggaatcaaattccataaaaatgcagtatatatctaaacaaattattgtgcatatatatatatatatatatatatatatatgttcatgattctggagcatccttctcattctccctgatttttctcgtcaccgaacagggcttcaataagttcgaaatcccaatcctgcatattattaaagtaaaaattccatattagaagcatttccaaattccaatttcaataacatgaagaatatttagtatgttgacttgcctgatcagtagccgagttacttcctgaggagacatcatcattcatcatgaacctgttcaagtgttccatgtttgcatatccatcatcacctcccatctaaaaatcacagaagttgggttatgtgtgtgaaacaaacttgaatctttccttttatatatgtaaagtataaaaagaataaaattttaaatcctatgttttttccgtgctgttttttatttaaaattggagattcactttaataattcgcgtcataagaaattacattaaaaaaaacccagattatcaaaattgaacttcaattctaattgaaaagcaataccaaaaccacataagaaattgtatccaagttttttccatataaaaaaactttgaatcattttattggtttattaagttatactcaccaagtaaaaaatattctacatgcaaactgtgtggattaaaaatacagaagagttactatgcaaattgttaaaaacttactaatcggttagaattcttgtcagagcttgttgaggtctcgtttggcagatttgatgtgcctttagttgggttaataatcacatcagtagtagcttggtaatttgtcagagctttgtaagactgttgcaatatgaggattgaataaaaaatagttggggttcgtgagacataaatatttgtcgaaaaggaatttgaattttcttatatgttatacattattatgttaacaagtaatatgagaagataccaatctaatctagaaaaaaaaaacaacaaaggaagatccaatgtgtgatatgtcatgtatactaatcaaaatttagaaaattcatgtgtacacattccaaccatacaaaagagacaaaggcaacaaatgtacctgttcaagggactgcacagcgtgattagagcttgaaaagtcagacttcaagaagtcatttgcattatggttctcttcagtctgattaagaaaacaaaagagtaatcacaaataccaagcaaatataacattcaaatgatgtaaaaatgttaaagttgcaagattctagttgtgacagaatttttttatagtaaaaatgaaaactttaaatatagactattaaatactttgttaagggtcatgtaactactagctaacttttaatcttataacatttttgtattgttacatagtccaaaccatagttctcacttttcacaataaaatagttctcactatatataaagtttttctatatccggcttacctcattaagaagatccatttcatctagcatcatgaaaagattagaaaagtcatcttcgtccaggaggttgacattgccctcaccaatggaagtaccaatatcattttctgcaaaattgccttgtagttgttgatgcagtgttgggtttccttgaatattttctgctggaagctcctttgaccaacactccccagcactagaagtagaagcaaaccctccttgagccaaatcaaaatttccttgcccaaaacttaacacattcttattcacattttcactcgtctcattgatcaagccaaagctcctgttgtaattcaaagatccaatgttccagtttccttgaccacagctaaacttgtgttgatttcccaatgaagcatagtttggatacatcaattggttgccaccatagttcacacctcctcttaggccatttgtggaagtcatcaagccatgtctcgttactccatctgaaggaaagacaacaccaacattgttgtaagagctttgtgcataatatggttggtttgcatagcttcccaacgtattttgctggatattattggtcccaacattgcttccaaagcttgattgtgctctaagccttgcttgatccgaagaactaccatgttggttgtgaagcatcatattcaagcctttgtgatatggatggggaaattgatggcttcttccaagtggagtattagtcacacttgaaacatggttgtaagatttaacagcattggctattcctccatacactgattgatgtgctattcttttcatatattgctgcgcagtaacacgcgacttcgcagtttttgcttggatgtctttgatcattgatgctgaaaggccataggcaaaccttgaccttagatccctgttagataagccctcaagcaatcctttatctgctacttttcgcaggaatatgcgatacttctgcaagcgtgttatgttcgtactaaagcattagaacttgtaagaggtgtattatccaagaaaatgtaattgaacttagatggatatgcacaatagagattctaccatgcatgtgacagaatagaagttaattagcaaacctgtaagtgactggcaacattttctcttgtcaagtttggcacattcatgacttgaagaattgtctttggaacagcctctgaataagtagaaaataagcgcatggttaaaatcaattacgtttacctactgcataagcgtagtgatttttttcacactccttttactacactagtacactttactcctaagtctatctctatcttctttttagaataattagaaacatacacacattttctcttttatctcattttttctatctttctttgagagttcttatcacatcagttatcacatttgatactttttcctttttctatgtttctcttccttgggtgtacatttaaagaactcttctttcttataatcaggtctttacatttcaaccaatttatacataggtgcaaatggagtctaaacaataaaaaaaaagtgtgagaaactcattgcagaatctagaaaccaaaaatttgcagcagattacttactctccaatccaatttgttttatggcaagcagaaagcggttgtgaagatatggtgtccaaacaacctttggtttctttacaagcgtagagctttctccactttggccttccttattcatttgggtactctttcttgggaaacacttcctttttctcttgctcacattcgatgatattgcagagtgaacatcctgaatagaagtgttatcacctggtattgaccccccttcaatattttgaaaagttagtttccttgcatactgccaaatgtctttgaagtcatctgcagaaaagggtttcaaaatatagtgtgcggcaccatttgctaaactcttggaaattacactatttcttccatctgaagacataactgcatgaaacaaaaaagataagtcacaaattgtttcctcttcccagtctccccaatagaaaaataacattttctattcagtttgttagtgtgtgttctgctaaggtgttaatttcattttattttttattaagagacaagaaagtagacacagaaaagagacgcaagtaatccaaatctcttaaataacagactaattcggcacaagaatacattggacaacaaagaattaaagtagtaagagtaagactgaaaaaattaactcaagaacatttcagcaaaagagactccaatactatgtcaggaatattcataaagcttaaacgtaagatacacaaaattagtcagtatattaatgtatatctatgagtaaaacaacaatgctttgatctttatagatgtgtatttaatttcattttagttttttaaaatcattttctttcaatattgtttacgtgtgtacatttaacatatacccatttttattctagttatgtatttccaaattatctatccaactgcaaagatgctgctgaacgaatgtgagtttttttgaaacaaaaagcatgtgaatgcatagatgagagaccaaactagtatatcagtacttttgtttcttacctatccttttttttctaaacttatgtgaattacttgtaagtttgttctttatttatgtatgtatgagaaagtactgttttttaatccattaaatatgttgaattacattgatatggtatatagggtcaacattagaatgaaagaaaggaaaataaagattgtatatgtactaaaaagaagaaaaagcggaaggatggtttaatgtttaattaagaatgatactcacttatcacgggtaagtggaattgattttcaacatacttttgaaattcaaatccattcatcccagatatatgaagttctgtaatgaggagatcaataaagcctctgaactctctaagaatctccaaagcatttagggcactgttggcagtgagaactgaaattcaaaatcagagagtgaaatataagttcattaaacattaaaatttaattacataatgacataaaaaatacaattttacctgaaatatcatatcatatgttaatacacttaaaaataatttctttattttttttattctcccctttgattagtcttacaaaaatttaggtaggaatcaattttattttatcagtttgtgtcccttatttttaaaaagtcatttattaattgtcatgccatcattccctaaatcatctccttcccccacttatctatttgtagagactaaatcattaatttggtcatcccaaatattactttccttgctaaactatccttaaagtaatacaattatataaataaattttaaagtaatgtccatcaatttaatcagtacgttaatatattaggctaacgttaatttataaactaatttgaaacatttttcaatattttggaaactattttatatgatttctaagacttaaagagattatttatataattatttactttattgaactatttaagagaggaaacatattttaagagaagatttatttcttctgtaatagatgataagcttcttcactagcataaaattggagttagaatatatgatgaatcccttgctgccaccaaaatttggctttacgaatgtgtcaagtgtggattaaaaacctttcaatacgaatagttaatactaaaaatgagtcaaggcaagtggaattaaacctaattcgactcaattagaattaatttgatttgagttcaatatcaatcttttctcaactcaaattcgtttcatttagaattataattattttatataatttatttatttgcttatttcatacaaaaaaatatgaaattaattaaaaagtcatttatatgaatttaatactataaatatataatttcattatcattttcaataaatcaattatcatgtttaataaatcaattatcattttgagtctcaaactatatccgacttagtttaattcattagcggtcctattagtggtcaaattccaatgatgaaggtaggtgcatggtgaaagaggatttttttttttttttttacaatgtcatctaataaaaaaatttcatgcataataaatttattaaattttacaaaaattacttaaaaatcatacatttcataatttttattaataatataaaatagttttacattcagtatataattattaaattctaacaaaaacgacacaaatcaaaactcaaaatttcaaaaattaattaaacaaaaaaaaagataaaacatcaatttagttcttgtaatgaaaaaaaatcgcactgttaatgaaaaaaaacgaatttagagaagtgggaaaagagaaaagagatagtgagagaaatggatcgtgaaaaatattaaattcttatttccatgaaatttgaaattttgtaatactattgcattctgtaaaaaaaaaatgactattacattattcaattgtttgaattaaataattttaattatctcatcaaaacacattcagaattgatagttgatgtaaattacatatacaaaacttttcaattaatctaaaattatttgatgtattactcctgtacactaaaattgccaaaatatataccttcgaaatatacaacaatatgaacgctcaataaaaaaaaaaatacaacaatatgaataattatattgtcttagtattatgaaatttgacacaaattattaatcatagtgatatataaatataattcatctgctgaattaataaatttcatataatgttattcttcacacatgagcattatgaaaaagtggtccgaatacatataatcccaatagaaacaaaatggtatacagcattagttaaataaacacagaaacacgtacctttgtatcctaatgaggtgagtatattgctaacaatggccaaagaagttttatcgtcatccacaaccaaaacactgatgatatcaactctctcatgtgtcattttcttttagccttttttgccgacctttcttttgtcttagacttggagcaaactagagaaaaccactgtaagaaaacactgaaagtctaagactatataaagaggagtttttcccctttagcaaaaaaagatgattacttacatgtgtcacttcagttctttaagtagagagacaagaaaagtagagaatatctttacccaaaacttatcccttatactgtctgatttgtatctttcaatttatatatagttcttttggaaatagttatacatatatgtgatattcagctcgaaaaaaatctttgctaaatagttaatatttattatattttccatgtatagtttattttacgggaagttccttctttaattagaagatttgacaatattttgtactgcctctttaggtgctacccatttaatttttaccaaaaaaattaaaaaaaaagctatgatttttttttgagatactccgcatataatttttttaataaatataacagtatatgtactgaccgtgaaaaaaaaatacactatcatttaattaaaaattaatttataacaaaatttattaatttttatattaattaaactgtgtatagataaaaactttgtctaattgcatcaaaaattcagaaatgaaaagtagatgaaaaaatatactatatattgacagtatatatgacaattttacactattataaaatattttaaaataagtgaaactataaaataaatttgttggcagtgtcataagacaatgttatgctatcataatacaattttacaaattattgtttatactttatagtaagattgctatttattataataaatatgttaaaagttataccaataataatatctaattacttgacattataaacttttacataatgcatagctattaaactcctcaaaattataatgatcaaattgtttaaattgttaatatctaaagatttgatacttttgatgaatttttttttaaaaaaacatatttaattaataattatgagtaatagtatatttggttaaagttcattttattaaaataattacttactttttaaaattttatatcaacatgctgaaaaaaaaaccaaatatttattaaaattaatttcaactatatatgtattttaaaaaatatatataaattcagtaaggtcagtatagtgatcaaatatatagtcaatttacacaaagtttcatattcaaaccatttaccaccaaatgtatatacatacatacatatatatatatatatatatatatatatatatatatatatatatatatatatatatatattaattccatatcaatatcaatgggcatttggaaatttcaaagttaaaaaaaaaaaaaaacggaaccacttctttaattactttgcaaaacagcccaatcttgttcattaattatattaaaactactttttttggtgaattgtattaaaactaattaatgaaattaaaaaatgtgaatttataatattaaatttaactattgggtactttaaataattaattaataagtatttaataaatgtatatttaataattttaattacataaaaagtattaaatatatttcaatatcattataataaatatttttactttttatgtacacctttaaaatctaaataatattttagcataaaaccccaactaaatgaacactaatatttttacaaaaggttggattcaggacaattaaaaattaaaatttttatactccttccattttaaaatgactttttagcccttgaaaaaaattgtaaattagctgatgttagtagtttttaggtagatgttcaaacaattattctaattatgcactctaataaatacgaatgttttgaaagacttaataatatatgtattaaaagtatcctctaacaagtattattttcttgaaatatttgttttcttaatctgaatcgtgattttaaattatggtccgcatgcaaccataattgcgactacaataacatggtgctttggcactcgcatcacgattacaatcgaagtcacatgagtcgcattttttgtaattatctaggaagtaaagattttctgatttgccacaattgcaatttaaaacaatgatttgtatgaaaagaaaaatcttaaacatcaaccatgttgttggttgaaatgagtgtttttaaaagtgcatacgaaagccacttaaataaataaataaataatgtggcaacagtttatacaaaaccacttgaataaaaaaaatatttagtatcattattaaaagagtttgattattactagagcattggtgtcgtttgttaaaccattttttttttatccatttactgtcgttgtcagcctattttttatgtatcaaaatagagtttgactacgacaacaattatatatccaaaatgtaaggtttgacttattttctttcaaagttattttaaaaggtttaaaatgaaaaaaattaaaaaacactaaaatatgttctaaaacttttcatccatttgcaatcaaacttaaatttcaaagaaaatattatatttgatgaagttttattttttctttgacagtaaagtactacaatttcacctgaatccatttgcatcgatttataacttttgttgaactctaatattttcaaaaattaattcataattaaggttattttaggatattaaaagaatttgactatcactagctacatcactggtatcatttgttaaactattttttttatttatttattgtcgtagtcaacctcgctttttttatgtactaaaagaaagtttaactacgacaacaatcataaatccaaaatataatgtttgacttattttgttttaaagttattttaaaaagtttaaaatacaaaaataaataaaactaaaatatttttgacacttttaatccatttgcaatcaaatttaaattccaaagaaaatatcatatttgaaggagtgttttttttttctttttctgcaaaaagtactacaattccacatgaaaccgactaaatgtgacttgaattgaattcacgacttatgccgaactctaatattttcaaacattaatttgtaattaaggttattttaggataattttttcataaaaatttagaagacaataaagtaagaatttaaaataaattaatttttatagttaaaattagcttatgcacttaatttttgtaaaaactcttttatttaatttctctaaaacgcataagttgattgtatttattctcaagtcttctcatgtgtgtatttaaaaataatacatgtatttagttttatatttgtatggaaagtgctcaagtaagtggggatccgcaaatgagtccacatgaagccaatacaaatttgttcctccaaaactaggaagaagtatgctagagaaatatagttaatataattattaattgtttaaatttgtatatgtatcaaaacattaaatgtttaaatcttaacaaatctttgttggtcgttccaaagtgagttatctgatacctattgcagacaaaattaaagccaaactctcattctggaaagtgctctattgtccttaatgggaagggttcaattggtaatcgaaatcaatcattcagggcatcttggctttgtttctaggagttgtacgaacaactctatttgtgacttcagtgtccttaaagccttttttgttgctggcaggcctcgcaagctagctttcttccctgattctagtaacttggcatgttcccctccttggatgggtgaaagctaattatgatgagctgctgagatgatcccctggtgttgcttcttgtggtggtatcttgaaggatcactctggtgctttttgctctcatctcaatattcataattcttttcatgcagcattgtggggtgcgatgacattgcaaattgcaatggttggcgctctttttaattggcttgaatcagattcgtagctgacagttaaagcttttaactgcattgatttgcaattggtgtctttgaaatgattggattaatactttggttcgctgtaatgagatgtcttttagggtttctcacattttatgaggaaaattagtgtgtggatttgctagctgtcaaactatggggtttctaatcagggttcattcggtgggatttccttcctagtttcctttgaattgtagtccttcgaggatagaataaggtcacttcctatagattttaatgtgttaatatctttttcatgggcttcaatttatgtgcatgcatcttcatttttttttatttgaacaaatttttggggtgttgcatatgacaataggtctagctagtagtgacaatctagctagttaggattattaattatgtctattttgatgttgttgacagtaaaattttatatttatttttgtcaacaaatctcatatatatttgaggaagagaataaatattttttttggaaatcttttattctcttatatagatttattattatgaaccaatgtgttaaacttttattaggagaacaaaataatagatgcaatagaaaataaagtgttaattaatcatgagaataaagatttctaataatgaataatttctcatcaatctttcctattaatggttttggtcttcaatttcttttattgttaacctttatctttaatccttatcgttcgatgacttatctttaatcttcattgttaatgtctttggtcttttatcttcatcattgatatattctatgattttgatgttttctaaatcttcatctctaaatactaatgcgtcaacataaaatattattttgataattaatcaaaataagcaccttagattcattaaaaattaaatcttaaaaatttaataatttgatcattttttgtcagcgtgttatatctaagtagaggagtcaatcatgagaattaagtcattaacaatgacaaagttgtttgttactagtatattttgttcaaccaatttcttataatagtttaaaattttgataaaaatgtaaatgaaattataatctaaaaaaaggtacaaaggatgggcgtttaaaaaacaaggtgcaaagctgtcaatgtcaaaatgaacagaaatttgcaaattaaaagacaataatgaagattatgttttaatatcaagaagtggcaattttgtattcccacattaccggaaaaaaaaatcaagaagtggcaattaattggacaggatgttggtgacagaggaaatgaagtaattgatcttttatagaagacttgaggtttatctaaaccctagtgacaacaattaatggatggtttttttaccactatgtcaaccctttaattttgttccttcgaccacgatgaaaaacacattggtttgaattaggttctcgtgcttggggctaaagtattataatgactgtcctctttgccttggctttgacagtggagataccgatcaaggtggacataacagcaatagacacatccaggggaagtttgctagagaatgcatgaaaattgatttaaattagcctgtggtagcaagattctggttgagtacgaaggtttgcatttgatgtgtaaatgttatggactcggacatactatctgtgtctagaaaaatgttaggaagagacttttcttaacatattttgttattaattaaaatatatgtagctctcctcagttggttaaggttattcttcaaaatcaatacaagttataggtgttggtaatataatgattggcaatatgttcaatcaaaacaaccttattggggttttatgcatggaagcattgggttgtccaatgttcttcatgcaaagataacgggtctgctccatgtaattcaattatttaggagttaggggtataataagaaggtgcagtgttgctcatactccagtcacgtaatgcagctagtgcatgcaagaggatgaattaaagtaataccgacaaaattttcgtcattattgataattttttacactataatacttgtgtcactaaaatattttttgataattttttaaaaattacatgtaaattactttttcattgttgttaagcttatgaattcaagaactatttggagcaataatgagtctaccagaattttcatatcctacgtgagggtaacaactatgcaaatcactaagctgaaatgggtgctagctaggtcaggttcttagttgctatggggttttcatatatcagtgccccaccaaacatgcatggccaccttgcttcttgcgaatgccatgagcatggcttttgaacgtcattaggctcttagtttctatttcctcattgtggttttttcacttctctagtattttactttttatgaaccacattctaaattttgtttatttacttaatcagtaccacaaagtacacctttgaaaatctacagaatattttttcataaaacccctactaaatgaacattaatatattttggcaaaagatttgattcaggacgtacaattaaaatttaaaatttaatatgttttcaaaagtgttcgaaaactaatgaaataaaaagacaattaagatttgattccagcagttttacaaaaccacccgaattaaagaagatttattttcatatcatataaatgtaaaataattattatcattatttaagggttttgactcacaataattgtatattcaaaataaaatggttgactcatctttttctaagttattttaaagctagcttagaaaagttaaagataaaatatacttttttgattgaattgaaatagaagaaaaatagagagaatatatgaagaagaaatagaaaagagctggaagagaaatgaaggatgggtttggtagaaagaaaaaagactggataaaaacataaaagtgtgagctcacagctttaatttaaaagaactcatattttaagccttcccagatttgtaaagtgatattttcttttaagccggatctaacttgttagcctacataaaatctatttatgttaaaaaattttctgatctattttaattttaaataggttaattggctaataaattaatgagaattattttatataaattaaattgtaaattgtaaaaattaaaattacttttaattatttaaaatatgacacaaaagtgaaaatacacaagtagaagttgtaatagttgagtgtatatttctataagagttgaggttaaaatatatatagtataaatatattattgagatctaattcatatgtatgttaatttatttaaatgtatattttctaacaagacttttaaatatgatataaatttatctcttaataagtcataatatggcttttataaaatattggtctaattttttcaaaacaatttcactagaagtcaattgtcttggtttgatttgtgttgattcattgacaaccatatcaagttgttaactcatattttttttattgtttctataaaaaaaattacacattacttattaaatatcataaatttttacttaaattaacaaataaacaatgatgatttgagtataacattcaacaataaaaataaattaaaacaaaattagaagttataatatttttaaaattttcaataaatacataataaacaaatatgaaattcaaatgaagaagattgtcaaaattaaattttatcaaatcaaaattctctttacactaaaacatgatatttaacttaaaattcaatattaatatctagttcaaaaataatattttaatctttaatttcttagataaaaagacctaatttttttattaaatgtcaatctcttacgtatttaataaaaaagtttgttttaagctcaatgattcaatgataactattaattaacttcattctattcttagctctaagatttaataaacattttattacaatttaaaataaataaaaaatatttttcaataataatctcatctaaaatttaagttaccagtgatcaatccataacgaccataatgtattagaaataaaaggctaacattgaagatatgtttaaacaaaaaaaaaaagaagcatattttacatatttttaattatgtatttttgtcttaatttagattaagtcaaaagttgtttggcttaagccgacatcttctcttcagcttaattgtatctatccaaaaatgaggactataactagaccctcatttcctagcttgactacacttgacctacaatttccacctcaaggtttcacaaaaccttgttacaaattccaattcaatccattttatattcttacaaaataattcattaataaatacatgcaatctaacaaaataataagttgaagaaaaaaaactataaatttacaaattaagataaaaaaaatgcataaataaaatcttaaataaaagaaaaaaaataaaataattacctaaatttatatatcttaaataaatattttttataattattggtatctgcgtgaggagtgaggacgttggggtggactcagaaaaatgaaatagctgtttgaattatatatatatatatatatatatatatatatatatatatatatatatatatatatatataatccattttacagtttgggggcgaaatggtgctgtgcacaacagttccggaagacgctagaactagaagggacaccatcaatatttgcacgtaatattactgtcttttttacatgttatgagttctaaacgattaacgctatgtttaaaagaatagttagtaaattagtacaaagctgaaaattaatttttaattaaaggttgttagttcaaggttaaaatttaattagtttatggattagaattgcttcataaatttagtagctcataaatatagaatgatataaaagaaaatgtttctatattttatagaaaaaaatattttaagtaatcataaatttaggttttctggttaattataaactcttattattttttgcttaaatgccaaataatttattaaaacaaatcatataaatatagtgtaacaattaatgtaatattagattggatgagataaatgagaaaatttattaaaatactacatatgacaatgaaaaagattacgatacattataactcaaacatttttccaaattgaaaatattaatataatgtatcgatcaaatcaataaactcattatttaccaaaaacatgtaattcagtcaaacaacattttgatatatatatatatatatatatatatatatatatatatatatatatatatatatatatatatataatatagtgaaacgtattgaaaacataatttgtttaatattctcaactaatcattagttattggttaaattaatctccaagtctctaaactatttgcaattttaaattaggtctttgtactattttttttcaattggattcttggacttgaatttttattattatttttaatagggaagggttctgcccctaagaataacaactctaataacacgaggggtgaggatggacattaagtcctggagaaggggaatattaattacaaagacaggtggtctaccaaaggtaaaattattggttaacatttttcatattttcatatgatttttatcatacaaaattaacttccattacttttcgaacaaatacatctgacttaaagcaaaacatcttatgtgtgggtgttttcagcaaaattatcaaggtaattataaaactctttcaatgagaaatttgtatatataaaagacaaattttgaagctcttgtgattaaaaattatcaggttacttattagttaatatatattttgattctctaattaagaattctttttggggcgggagaattagtagtaccaccagttaattatttgaaatacagtaccaattattaaaaatacttttatggtttatttgtaataatttgaatataaaaagtagtttttaaaatgaaaaaaagtgagagcatctttctttataagagcttcgcctgactttttaacagagaataagagcatgacctgacttttcctcatagctagccggctatcttctttataacacacagcatttggtatactttcattttcatatttgttcaagtttgattctacactcctatcatactactcttttttcttctaataatgcctgcaacaacacgttcccttgcatccatctatgatgtgttcctcagcttcagaggtttagacacacgccatggtttcactggcaatctctacaaagctcttgatgacaggggaatctacactttcattgatgatcaggagcttcccagaggagaccaaataacacctgcactttccaaggcaattcaagagtccaggattgctattactgtgctttctgaaaactatgcttcttcctcgttttgtttagatgaacttgtaaccatccttcactgcaagagtgaagggctgttggttataccggtcttttataaggtagatccttctgatgtcagacaccagaaaggtagttatggagaagcaatggctaagcatcagaagagcttcaaagctaagaaggagaagctgcagaaatggaggatggctttgcaacaagtagctgacttgtctggctatcatttcaaagatgggtatacaatcatactaatatattttactttatggtttttattggattatgatttaactagtaaaatttaaatagaaaagaaatgctcttgttaaccttgacaattaatgtagctatcaagacatggatgcaaggattttaggctgactccatcagaactttttttgtttgtttgaaacagagatgcatatgaatacaagtttattgggagtattgttgaggagctctctaggaagattagtcgtgcttctttacatgttgcggattatccagttggtctagagtcaccagtgacagaggtaatgaagcgtttggatgttggatccgatgatgtccacatcataggaatccatggaatgggcgggttaggaaaaacaacacttgctctggcagttcataatttgattgctctccattttgatgaatcctgttttcttcaaaacgtgagagaagaatcaaataaacatgggttaaaacaccttcaaagcatccttctttcaaaattacttggtgagaagggcatcaccttaacaagttggcaagaaggagcttcaatgatacaacataggctccgaagaaagaaggttctcttgattttagacgatgttgacaagcgcgagcaattaaaggttattgttggaagatctgattggtttggtcccggtagcagagtcatcattaccactcgggacaaacatctgctaaaacatcacgaggttgaaagaacttatgaggtgaaggttttgaatcagagtgctgctcttcaattgcttacttggaatgcttttagaagagaaaaaattgatccaagttatgaggacgtcttgtatcgtgtagtaacttatgcttctggccttccattggctttggaagtcataggttccaacttgtttggaaaaactgtagcagaatgggaatctgctatggaacattataaaagaattcccagtgatgaaatcctagagattctaaaagtaagctttgatgctttgggagaagaacaaaagaatgtttttcttgaccttgcttgttgcttgaaagggtataaatggacagaggttgatgatatactccgtgctctttatggtaactgcaagaagcatcatcttggggtgttggttgaaaaatctctcataaagcttgactgctatgatagtggtactgttgaaatgcacgacctgattcaggacatgggtagagaaattgagcggcagagatcacccaaagagcccgggaagtgcaagagattatggttaccaaaagatataattcaagttttaaaacacaacacggtgagtgagctcatgaatagttgaattttttttttttgtttatctcgtatttaacatcatggttaactttttcttgataatttgtaaatttttctaagcgagtcaattgatatttcacacaagttgtaatgtggttgattcgtgcctttttgcattaatagggaactagtgaaattgaaatcatatgtctggatttctccatatctgacaaagaagaaacagtggaatggaatgaaaacgccttcatgaagatggaaaaccttaaaatacttattattagaaatggcaattttcaaaggtccaatatttcagaagttgagagtactgatggcacaagattgtttaccatctaactttcatccgaacaaccttcttatatgcaagttacccgacagttccattaagtcatttgagttccatggctcatcgaaggcaagtttaaagagtatattttcctcattccatgaattaaatttattcatttgtttcttatttcttttcttcttttttttttttttcctttgcagaagttggggcatctaacagttttgaattttgaccagtgcaaatttttaacacagatacctgatgtatctgatctcccaaatttgagggaactttcatttgaagagtgtgagagtttagttgcagttgatgactcaattggttttctgaataaacttaaaatattgaatgctaaaggttgcagcaagcttacgagttttccgcctctcaacttgacctctcttgaaacacttgaactttctgggtgttccagtcttgagtattttccagaaatattaggagagatgaaaaacataaagatactttatttgattgaccttcccataaaagaattgccattttcatttcaaaatcttattggactcagtgagataaacctgaataggtgtggaattgttcagttacgatctagcttagccatgatgcccgaactgtctgcattctacattgcagattgcaacaggtggcaatgggtagaatcggaagaaggtgaagaaaaagtggactcaatacaatattcaaaggcacgtcagtttcgtgccataaactgcaatctatgtgatgatttttttttaacaggttccaagaggtttactcatgtagaatatttagatctatcggggaataatttcacaatccttcctgaattcttcaaagaattgcaatttttaagagcacttatggtgagtgattgcgagcatcttcaggaaattagagggcttccaccaaacttagagtttttcgatgcaagaaactgtgcatccttgacttcctcgagtaaaagcatgcttttaaatcaggtattgtcttttttgttactgtacatgatttgatgatgtatagtgcacttaatgttgttaaacttatgaattctttatgaatgatgactaacagaaactgcatgaggctggaggaacaaactttatgattccaggaacaagaataccagagtggttggatcagcaaagcagtggacattcaagttctttctggtttcgtaataaattccctgccaaacttctttgtcttgttattgcacctgtgtctactgggattggtgtcaaagcaaaggtgttcatcaatggaaaaattctaaaacttccattcttttatggaagtaagaagatacaaagtatgttggaattggaccatacatatatctttgatctccaaccgtttgctttcaaaaataatattaatcggtttgaagaagcggcttgggaaaaggaatggaaccatgtggagattagatatcaaattgtgttaaaccatataaaagaaaaaagagaacaaggttcagtcattaaagcaactggaatctatatattcaaagaagaaagcagtatggagcaagatattcgatttgatgatccatatctcagcagttctgcatcagaaaacccctggttgccacaaaccatagctttggggacacgcaagttttccatagcttttttcttatttttttcatgttttttattttattattttggtttcagttgtcaaaaatggacttaacccaatgtactttcgactcatttatattcatctttcacgactttatgcattttctatatataacctttcatgttttatccaacttgaaataatatttctaacttagtttaatttcaaacataataatggaataatatttttttttattaaataactaaaaagttgtaaatttaagtgcaagtcaactaaattagtattcacataaaaatagataagtaaattagtattcatcgaagtttaattctccatgactgcttctttaggcattgcaatgaaaagaatcccatgagaaagcattgcacgaattgaattcatattacatcttttgaaattttaatttctttgcgtaaacgactcaatttgttattggatgcatccataggcctttctccatatacaattagaataaatttcatcttaatttattattatgattttctttctatttttaatttatgtcagcaatattttctcttattacttatcaagtttggagcgattaattatgatattcttaggttctgtgtccttaaaaataaaggtgtgaagtttggagaaattgttaggttatatatatatgggaccatcatgtttccttaccccgataaatgaacatttgtagatgatttaataataagtaatataataaactcattattcctagaataaattctaattttatcttagaatttgaatttaatattaaattaaaaactagcacaaaagagaaattgcccactacatactatctttttgttatggaatcttccaacttctaattctaatggataataaattgactcaaaatataatttgcacattaagattaatgtcattgttggctcagtgatgctaataggcaagcgtatcgagtcacaaaagtaatataaaatggtaagaatcgagtatcgtagccacaaagaatttgtttcacctagaaaaacatatgttcaatgaacaaatatttgtataaagcaagtaaatattgagttggatttttgaatgagaatctagttaaacgcaaattaaaatatttagagattaagaagtaaaaacggtgtgcaaataaagttcaaaaaattggaagaagaaagcttacacgatcagaaataattgtttagcccagtaaaatgttcataaaaaagatatttatagtataaactggttcaaacaataataatttgtgcacttaattgatatttttttttcatttgtgaacctttatttttcaaattcaggctctattaattttttttccttcaatatttcattaaaattaattacttaattaattgtagttagtttaataaataattgaataaaatatttaaaagtagagtcaatgtgagatctaaaaaaattgtctaaaatcctaaaatgagatttacccctaaatatatatatatcttaagagattttcaatactacggaacgctatgaaatccaccaaaaaataatctaagattctaatttgagatctatattattatttaacagattctcaacccactaatgataagtagtgttaactcattcacaagtgtatcaaatcaaattgtcacaagtagtaaagttaaaacgaaaatccgaatgtcagaatctacatattagattagtgtgaacccaaattacaaacaagagataaagaatttaaaatagaagataaagagagataaaaaaaaataagataaagatttaaaataaaagatgataaagataatatatacaaatgataataatgcgtttgaatgtttaaaggtaaatccagaatttaaaataacatgtttaaccacccttgatgtaatgttaagttaatgttatttcaatttttactcatatctattaagatacttaactctgatccctcgcgagaccaatttttcttcaagtttttacatcaattttccaaagcacttaaactttgaaattttattcttttgaatcctacttgtaaaaaatttcttcgttattttgttaaaaacaatgttaaagtaaagaaattataacagatctacattattatttaacagattctcggtccactaatgataagtaatgttaactcattaacaagtatataaattaaattgtcacaagtagtaaagttaaaacaaaagtctgaatgtcgaatatatagagactttgtttatttagattggtgcaaacccaatttacaagcaagagataagaaatttaaaatagaagataaagagaggtaaaaaaataagataaagatttaaagtaaaagatgataaagagaatataaagatgatgataatgtatttgaatgcttaaaggtaaatccaaaatttaaaatatgttagggcctaacatgtctaatgacccttgatgcaatgttaagttaatgttattacaatttttatgatgcaatgttaagttaatgttattccaatttttactcatatctacaagatacttaaccctctcttacgatgacatttttttttcaagtttttacatcaatttttctctaaaacattaaatttaaaattttctttttttgaatcttactagtacaaaattataatgatatcaatttcttcattattttgttaaaaataacattaaagtaaaaaaaaattgtaattattcttagtcaaaattgactatcaatttaactcaaattatacaattatcaagtattgaaatcaaatataatatttttagatagtaaaataaataaataaattaagataataaaaccaaaatttattggtatgaaaattaaatttaagtgtttaaaattttatattctaaagtggacttacatttttaaatttgagtataaattaaacgaagagatacaggctgcttggacctaaagtctaaaactataattctgctacatattgaaaagaaaaacctaattaattcatgctgagttggacccaccaacaagttgataattgaggaatctacgcgtttccgcggaaagaaatataaatggaaattaatgcactaaagtctattctaatgcgtccttttgttttatctccaggagtattaattaaattataatatattatattgatgataataagaaaatcgatgggcggttatttatgtcaactgtgttttagaaacaatgtgccatcttgtcagaaaagaaatgttaggctaccggtgttagaaacgtgacacatgtcaaactttaaaaaaataattgcacacatgtcaagcttagtatagcaagaagagacgtgatattgtttattttttggtattaaaacgtgtaacaattttcaccccattaaatcaatgtgtttggcttccaaatttatttgtttgatttttaatatttatattatttaaataatctacatagtatttatgtatcacaaaatttggccatataaagtttattatgtaagattttcagcttttaaatatttgatacgagttttgagaaagaaaacattagagggtcaagaaattgaagatgtgtttgattatgtttttgtttcttgatttaaaaaaatactttataaaatttatttttagagtatagaaatgaaaaaaaaaaagacgtaaaaatgcgaagaatgacataattaatagaaaactaaaagtgaagagtgaaaattactttaaaatgttcttatttctgatttttaaaataaaaaaatagatatgaaaatttaaaacaatttgaaaaaattactctcattaaatagtttttttaagttttctgtttttaaaatattgataaaccattttcagaaacacgaaacaaacacgcctaagagacttatctcacgtttggaaagatttttaaataggaataaaaaaaagttttgacagataatattgctagttatgggaaaggaccaaataaagttttcaataatatgtcaaaggagataaaaaaaaaagtacaaacaataattaacaaaaacctacgtccacaatagaaaaagattacagtgcttgaaattaagatttcactcctcaaatttcttatttcaaccaactctcaaaaattaaggactatgacttgatttagatttcagtcacatgaatgcaagtatatgccacaaacttgttggcaggtagccggtaggaaagttgtactaattattaattagctatagttaattagtctggtagttgtaacttgtatatataccacagttgcatctgcatgtgctcatggcatcgtataactaactaaacgttttcttttgtaattccttcattttaaaattattgatgttaaagcttttaaaaaaattcaaattgatttatattctcacttgtcaataagatatttaaacatttattttattttatcctataattaatgttgcctttaacgaattaatgatacatttattaaaatgaagagaactagcaagaatattttaataaaattgttcttgaataaatgttaattttctttaaatacttattttatttatgcatgagaaataaccttaagtatcaattattttgaaacggaaggaatatcatggtgctattcattcattcagcaatgaaagttatcattaaccctctcctaatacttaaggttgagacattgcgaaaaacgaatgagtacttataaaagatgcttcaactctcaagtcaatgatctaacaatctctctagagtgacgaagtgtattaaatatttacattttgcaatgatattgttgtgtttatatgagaatcaaagatagattgattatctagtatgaacccaaggccttccaagaacaatgattatatgttttggtgtagcgataagttaactttgttttgtctatttcgtttgttgtctcagtttgcttcaagagctagtcacatcagattaggaacatcatccttgttgtcattgtctttataattggtataatttggcattgcagaaactccaaaagatttagcaacaaatctccagatgtgcaaagctccggggttgctctgatcttggtcaagctgtgcattactggtaatgctactaaatttgtcatgaataatactatatctgattttgtcctcttaagatcttccaagattcaaggtcattcgagaaggagtcagattatcaaacaagaagtattcatggatggacctagtgcaatacagatggagcaactaaaagtaataatacaaggactgctagatatggtggcattttcaaaaatgagagagtttgtgccttgggttgctttctttgaatttgggaactcaaaactctgtttgcggagcttgtgggtgtcacattagctattgagttgagtgccaagaagaattggagcaagtttggttggagtgtgattctaagttagtggtcaaagccttcataaacctctctctagtcccttggaagctgaaaaaaccgttggaccaactgtgtccatattactaagagtatgcactttcaagtaagcaacatttacgaagaaaagaaaatacttgtgcagattcttttacctctcacccaactacaattaattctttcattttttttttatcggtgtgattgtattttttcttttgtgatagtagaatacaacagaaatcagataagtcttcttacctatagattctcttgatagataggttgagttttcattggttttgtttgctgtcttgtatatctcattctttcaattcttttaaaaaattggatataaaattgatttatttttaaatcttttaaaaatttaaaaattaaattaaatcattttaaataattttaaaaattaaattgataattaaactttaagtgttctccaatagataagcatagaagactcctaagttaatgtaggtatttaattagaagtatattttatagtatatgcaactatgtatgcactgttgggagcataccaataaagaaaataaacgcgcaagggaattgtaacatgtggtggtggtgaagcacaagcaggtgccacctgtacgacagttgtgtttctcattctcccaaatctatcactttccctacgcgaatccagcttatgtaacggaagacaacctaatcaaccgtactataataattcccacccgtcactcaactcatgcctcctcctcgtacttatacacaatttcctaccttacgtcacactcacttatctagagagataaagttacctatactttctcaccagtcaccaacctttctttttattgttgaaaatcttattcttgttttatatatagtaaattttatttataactttatagtttttcgtaaattttaactgaaaatacaatatgttattataaaatacgtacatgttttctagttttcttttggttcccaatttagaagtgataattttcatcttctaatttaaaaacatttcacttttagtctctaattaatgaaactattttgaagtgatcatttttgtttcatgacgaggatcaaaagtaggttacttaaaaatatcacttataaatttagagaatcaaatgaaaaaataaacatgcatttacgagataaaaaaaaagtattcaagtcttatttaatatattgaagattcaaacctctttaataatcttgggtgtgtctttattaactgtctaaagagtttgattgttgttcagtctaatatttattctagttttaaatataaaaaaatatttttttatagtcttaaatataagaaaattttaatttatttatttaatattattattttttaaaatacccttcattaatttaattaaaattttagtttcaatcactttttttattcctaagattaagtttcaatggtaaatttaaaaaaataataataaagattggtgtaattagatataattaactacttttttaattagcatgaattattttttcttatatttgaaattgaatgaactactttctctccattcatatataaatcaaaataactaattttacattacttaaaaaaattagttagacattatttaattttcataacatcatttaaaaataaatttatttctaaaatattatttatttaaacttattatcataaataaaaatgagttattaaaaataaaattataattaaataaataatatttttgaaataataacattaaataaaacaaaattaattaaatttagttatatttaaccaagactatttttttattatatgagtcgaaaggaagtaatatctatctgttctatcattttttatatttaattttaaaaaatatcactgtaaccgaaatcccacacaatatcttatgactgtgtcaaacacaaataggataacatatttagtccctcttttgttcctcactcactcccacacgcacacttttctcaacactttcctctttcactttcggaatcagtcaaaacccaatcacaaggctccccaactagccaaccagctggctcctcacaaccctgagctcacaatcacactctcactctccgtgttgcctttttctctctaaaccaaaattcctacgtatatatatatatatatgcttccctcacttgtctttgcttattagtatatccctcattcactctcttttctccggcagcaccaaaaccacccaacacttgaaatcaatatccattgttaccaaaaaagaaaagatcaaaacaccctttacatcattatactcagttccctctttccctatcaaaaccctttcccacaacactactcactctagtagtacaagcaaaaccttctaactttggcttcagcggcacatatatatatatatagaacatgtataccttgaaccactcttcatatttgtaccatgtttcccctgagctctcctcttccttggactcgtcctcgccggcttccgagggctctcgcggcgtggcattttccgacgaggaggtgcggctggcggtgaggcacccgaagaagcgggccgggcggaagaagttccgggagacgcgccacccggtgtaccggggcgtgaggaggaggaacacggataagtgggtaagtgaggtgagggagcccaacaaaaagaccaggatttggctggggacttttcccacgccggagatggcggcacgggcccacgacgtggcggcaatggccctgaggggccggtatgcctgtctcaacttcgctgactcgacgtggcggttaccaattcccgccactgctaacgcaaaggatatacagaaagcagcagcagaggctgccgaggctttcagaccaagtcagaccttagaaaatacgaatacaaagcaagagtgtgtaaaagtggtgacgacaacaacgatcacagaacaaaaacgaggaatgttttatacggaggaagaagagcaagtgttagatatgcctgagttgcttaggaatatggtgcttatgtccccaacacattgcatagggtatgagtatgaagatgctgacttggatgctcaagatgctgaggtgtccctatggagtttctcaatttaataacgtgcttttggtttggttttttatgttagttttggagtgtgactgtctgtactggttttttattagtagtacggatactagctataggtggcagattgaaagggaccaaaaggaattttcttttgaaaccctttttgtcaaagtaatcaatcgcgtatcatcaagtgaatcccttgatcaagtttatgtatgaattaaataaaagaagaatctagttttggtatgaatgtttgttaaagtaaaatatcaatgggagttgagtatgtgtacgtgaagtgtgaaccttaaacttgatagaactcgtggtagagcgttatttatagtttttttttttttttgccaagtactgtacgtacgaggagcccataaaaaaactaggaccacacttttatccatgtagctagattatagtattagtttttttagtttcaaaaatgtagataagaagtatattttcttgtcctgatatgagttggattgggtcaacctattatattcaattttgaaattattaatcatctcaacagttcttcgatcaagtcttcatagcttcaagtattttgaaattgacacctgaccctgcaataatgccgcaataattgaagaggatttgcttggacatagaaagtaagtctttgaattttcctttagaaaccaaaaaatctcattctctcacaatgtggagccacgtcgccaacttgaacaaggttgaactgttcgatgacccaaacagccaaaatcaagttaccaattgtgacttaaattctatattcctgagaagaagctactgataacgtgtaaatgtacagttgcaagaaaattatgcacctaactaagttttaaacttttgagttcaatcttgatacacaggttaaaaaatagcattgaccaattagaaatctccttaaacaattattacaaaatttaataatcttagcattcatggttaaataagaataacgtaaccagtgtccaaaggctcctcattatatgaaatatgggcagtcttaatcttgtatatgcaaaaaagactattttcatattgaatcaatgaccgattagtcaccaccaagatacaactttcgcactcatggttaaatcatatattataaaaacatttatactagtatttaaattagtctcattcctatctgccatcttccgtaattaagatgaaggaagcaagagcccgtgagaccgcagaaattttaaatttctccgtaatttgtactttcacatttctgtctaaataattaagacaaatttcatgtgtctctcttcttgctattctcttcatttttgtgcgcactatttcttcatttttcttcttgaagaaattaatgatgaggaaaggaacaagagaagtaagaaaaaacattcgattaatgaaagcagtgaagctgacccaacagacaaattcgcaggaaaaaagaagaaaaaacttggatttattttgcaatttaaccaaaaattaatcatgtaaatatacaaattgtagagggaaactgatgtagctaccgagctagctttctcatgtttcaataatgaatggtcaatcaaattcacactacttaatcagaagctagtcattaatttgcccattaacttcctcaggtaaccattttgaagggtatttagcttctttagaaagtactctagattgtttctctttccatcttgaatgtgtgatggaaccttctctaaaaggatgtgagaacatcaagagtgaattatacataagttaaaaatcaacttttatatatatataagtctaaggcctgtgttttcagaaatgcttataaaaaaagaaaataagaataaaaaaaacttatccctaaactaaaattgaattatacataagttaaaaatcaacttttaaaaaagttaataaaagaacttttacaaattaacttatatattaaccaaagttcacaaatagagaagctttttttaattattttttttcctataaatatttatgaaaaaaaattattcgaacaggtcactcatgcgaaatatctgttagtcttttctctcttaagtgccgttaagaatccacgcagcttctattgttttgaacaggtgtataattgcaattaatttcactaagaaagtatgcctcatacatgaggaaaacaaatagttaaaaaatcaaaagcacagaaaccatcgtgttaggcatttcaaataaacgcctacacgaggggaaaaaaagttctgatgtacaaaaacaaagtaagcagcagcatatatgacaaattcttcatctgatccaacttctgccaaattgtttctgcagcactattttaccttcttaagcagagcagtggttctaaactcagcatcatcccttataaaaccccaccaaaaaaatgtgagaggaatgcttgttgcatgccatagagcatgagcatccacatatcccatgtaaggtgggaagtcatatgtctccaacaccatagctaatcctcctcccactactactgcccataatttccatcgtgccgggtggttcgaagcaccggcccaaatggcccaaataagaagctggacaacaaccattcctgtgcaaactattctgttcaaacctggaaagaaaagaaaaagaaaaaaagtcaacacatcagctcacgccacaataacaatgcagcaccatttctatagacctcattttgagtaaggtcctgtttgaatgaaaatcaacttactcaccttgactttggagaagtcagatgagagaacttttatcaaagataagcataagttgattttatcttatgaagaaactgaattcatttgaccttattttcttcttccttaagtacttatggagaagtttatccaaatagggtcttaaacaattcgaaaaggaaatgtgtcttccatcttttttcagcattgttaacaaaagcattttgaagttctgattgtaagatgtgtgaaagggaacaaaaatttaaagataaaagattaccgtaagcaagttcatagaaattcagatacatgatatgagttgtcacaaaagcaagtaagggagcagaaatcatgactctagtagcctcatccctcacgttaaaagctcgcagtattgctagaatgagggtgaatccaagtaatgccacagcagaagaaaaatccagcttctctgttaattctacagctctacagtaataaaggttggaatacatgtcaaaactcaaccgaaaaaaagaagtttaaataataattacggaacattctctcctcttcattataaactaatatctgaacaaaataagcagtaatggttggctgtattaataacaaagatatcagagtatatttttttatctgttgaatgaaatgagttaatgattctgggcaatgtggttgtgcattatatatagaataggccagtcatatttaatacatatttgctttatataaaagccttgtgatgcttatatatattttgaataaacctccaaattaatcacttagatagtaaacatcggtcactttagtctctaactctataaaggtccatttacttgtccttaatgtcagtgaaaatgtggcgaaaaaggattaaagtgaatgacttgttgcagtgaccaaggctaaaaaattcaaggactaaaataggggtttactcatattttatgagtattaatcattgtagggtcaaaatccaatttttacgtcactactcaaaatacatacacaaaagtgcatgaaaatcaatattaaggcaccacgaagaaacaactgtgctttgagggttattacttcaataatgaatcataattttatatataaagaacaaaccataaacggaaatcacaaaaacaacttacctactatggaaaacagcactccacaaccatgcattcatggataaaatcccataaatatgccacaatccagtgtactcatagtaagtcttcttatctggcctcaaaggcaacttatagtacacaagaatgaaaaaggatacccaaccatgaaactgtatagcaagattgacagcagacagagcaacagccacaggttcctgaaatcatatatagcatatccacaccacaatcacaaaccgaaacaaacttagcagtaataccattcaacctttcataggagaatcatgaaagaacctgaattccataaacacgatggaatggccattttccatgatacttgacaggcttgtcaccaagttttgttctttcttcctctctagatagcatacagtaatatctacagtcagtgcaacagtcccattgtttccacctcagatagaggggttcatgcatataccatggaccatcaattggttttccatctgatgagaatttacaatgttgaaagcatctatcccctacacatccagttttcttacactgctccacacaacctctgcaatttaatagtcacaaccaaaaattgatcatatggcaggcaagacaagaataaagcacaagataattattctactaatgctggatcaatcagcagaacaactatagtttctgcatctaccattctgcttattgtttatttactattgacaagtgacaatgtttaagtcacaattttcttattgttaaaatgcctatctcaacaactagattttccaattccttcatgaaagcataaataagggaatggattaaactgaacactctttactcctttgttctctctctctttctctctctctctctttggttagtcatggcatccgttgtaacaattttgctagcatgtttgttttaagagctaagacctataactttttattgttaattatgaacaagttaagatttttattttttattttttttaatttgagaatttttatatatagttagtatgaattatataaactgtataaaaattttgaaaatagcagtcatattgttatgcactatcaactatattactatagcaattttggtgtcagctgctacgcgtctgctatctgggattgatagaaataactaagtatgcctacaattaatattatgtcaatagttgtgatgctattagctcaagcgttaaacaagaaaggagtccaacaaggcatgccatcagttaacattaacataaaaaaggtatgatatttaaattaagaggttcatcctttactgattgcatcattacaaaaataaaagttcagaagattttaaatgttctaaatgctctgaactcaacttcattcacatgctctttataaattacaagatgtgcaatgtgaaatgtaatagtaatagaaaggagttttggagcactattttcaatgcacccaagaaaactatcaaaatattgaaataagagctctaagcttttataacaaagaaaataaaaagtcaatttaaacatgaaagttgatcaggaaaatagtattaagcctaaggtaatgttggattttattaatcatcgcacatcagaaaacaggcttaggtaatgttgcaatgcaatacatcataatgtatataaagtttacccaagcaggttatttatgctaggctcagtatgataagaaatgcactaaagataaaccccgttacactctttgttaataactcaatatttctaagaaaaaggaaggcatatgatgatcagtaggagcaaggctgttaataatctaagctatttttgtgaactattcaaactcgactcattacatgctcaatcaatcttgtttttttagttaaacgtacaagaccacgcttaaagacaaggctggctatttaaacaagttaaacccaacattggcaagcttgacattaatagtttgaatatatttattacctaaaaagttgtaattttatttattacatttacttgacaaattataattttgtttattattatctaagatataccatttaccgaatttcaattttaaatgggtgactacaagttgtataaaattcaccatttccatcatcaaagatttcattttaaatcttgagtaatctttatgaatataaaattatgttttattacttatttacttcactttctagcttcaaagtatctatcagaaaaataatcaagccataaacaaataaacgaatcaagcccaagcttcatatattttaaccaactcaagttgaagttttaaatttgttcagtttaaataaacgagtgaagcttgagtaacccattttcttcacaaggcaaacctaaactttagctcagctaaacttgtttacaccagtgaatgcgggtggagaaaaatcatggcaatgaatccatgctcgacaattgacatcaaaccaaaaagaaagaaaaagtgcatcatcgttcattacatctatgcaggacaccagaatccaagaatcaactacataataatacaccagaatccaagaatcagcaaaaaccaacgacataataatacacaaataacatcaacttaaaaatttctaactccacaataaaaacatttataaacaaaaagaaagagaaaattccaagttccaatttttactatacccatatcatataaacaccaaacccagatttttttacgtcccaagaacctaatcaagaactttgattgaaaatttcaatcttgattctccaactctaaccatatatatatatatatatatatatatatatatatatatatatatatatatatatatatatatatatatatatatatatatatatataaagagagagagagagagggagagagagagagagagagaaactaacatgtaaagcggatcggcgtcgccgtgggtggcggcgagggggtggaggaggaagaatacggtggcgaagagcaagagagaacgaaagggactcatcggaatcgcaagaaagcaaaagtcaaagcccgaagggaaaggaagagtgggagaaggttccggcgagaattgacgacgagttttgcattgaaggaaaagggtggcggggttgcggtgacggcggagagcggtggtggtggcggttgatctcggaagggaaaggattgagtcaactcggagcgagttggggagcggtggtggtgtgtgggtggcctaaagagaaccagaatctcgtgggaagatgaacatgaatatatattatatgatattcttcacaatgttattattagcaggggagggaaagagaatcaatccgtgtatttataaaaaatttaaataataaaaggaaaaagtttaatatagtttaaaaaataataaaataaaaaaattaataatgtaaaagtagtgaaaatttaatgtaagttaaaaatttaaatgtaagaaatgatttgaaaataaaaatattaagtgattgatggataattatttaattttaatcagaaatatgtataattaaataagattaattattattattattttaatatcattaagaataagaataaaataatttaaaaaatatgagactaaaaactttacgtaaaattatatcaataataaaaaaggactagagtttaatgtccatgtgagtctaaagatttttcttgtgaatcaatgcatttatcaagatatattctgcgacatactgaaatttattccggattgttttatttaggtttttaaaattcaatcaatcaaattatcttaactatgattgttaccaagtataaaattcaataatatacatgttagtttaaaagataaatcatcaatttcactatgaaaatgttagaccttaattcttataaatttaatcaacttaattcctaatgaaacaaggaaattaagaaaaaaattgaaataaactgcaattcattaatcatactagttcaaccattacatatatgtgactttgagtgataataattttttagtgcaataaatgataatatcaacgtatatttaacaaccaaaattttaataaggagttaaatttaagaatttttttttttttggatttagatgagaaggctaaaaattttaatgagtttatttaaaatttgatttatttcaagaatttatataacaatgtttaatactttcaagaacctggtttaaaaaaaaatactttcaaggactaaaaaggttttaaaaaaatactttcaagaaccaagaaggtaatttaccattatgtcgtggatgacgaagtagatgctatggggaatttagtggaggcgacgatcgttggaggtagaggactgtcattggaggtgacgatctttgacgatcacttgcaagttaaactctaattagttactaacaaagattctgatgttcaagctcgtatatgcataaaaagattaagtgtctagaattaaagagaatgagtattatttcttattaagtttactcaaataaggctctcattaaatcatggtggtgtttttcatgtaatgtcatgcaaaaggtgttcttgaacaaaatctcttaatttgtggtgtctattaccgatgattaattgtcatgatttaatgtctcacgtctatataagctttgtgtattattaagaaggttcggagtttactacacaacacaaattgttaactcattgataagtgtaccaactcgttcaagtgatattttaaaacggtaagatcaagtgtcattttcacagaaattttgtttgaactcaagatggtgtacatccaatttatgtgcaattaatgaatgaaattaagaaatgcaattcagatcattttgttggtaaattagatatttatatgattctagactaaggctgagaaaaaaaaaaacaaacattggaaatggcgaataattgtgaatgcaggagttgattatgttaggggcttcctaccgaaacttctcttgatgtaagataattaattttttatttattttatagtactctaattatcacctacatctattaaagtattctctaatcgtgattcctcatgtgagagaacctaattcccatatttcttttcttaaatcatcaagaactaaattagttgaactacatgactaatagagatgtataaacaggctaaaccacctcacactatccctagaaatgaaacattttagatgttctttccagttctaaggattaaccacattttacaatgcctaaactctaacatggtatataaatgggtgatcaaaccaaatacatgtaaataagcacagaaagagacaataaaactgataataatattaaatagacagtgagagtcattacatcaagagagtttggtggaaagctccccgacaatgggttgcttagtccttcattgtcatgagaggcttaactatacaaaaagagtagaaaatatgaaaggaaatgcaatgaagatgaatgaatggataatgggtggctcccaatgactatattcttcttcctcaagctctagggttctgtcatgtctccacacaaacatcccctcattcttctctttttcacttaaaaaccatcctgagatgagatttcacaattttgcactaagtgcgtctacgcactaagcgcgagtaaatggttgggcgataagcgtgcaacatgcgttaagtgtcccttcgcatgactttagattctccaagctgtttcttcccgctaaatgacaacaatttgctaagcgaacctgacgcgctaagggtgaatcctcgagcttcaacttctcttcctatcccttgctttctacaaaacaagaactaccaaaacaatataaatttagtagtttaacgcatctactgcataaaaactcaaaggatgtcgaaattccaatggttcacacaaaaagaagcaatgaaatgggagaatattgctaattcttatatgtttgaattacagaatctacttatgcacattagttatcacacatcaattttcatttattaggaaagagaaatggatgaatgggtagtaatttagttaggaaaaatgtttgatagacattcaatgtgttattcaacacctacagagagaaaaaagagaaaaaactataggtacgataaggtttatgatgtgatacgaagaaagagatagagaaaaatgagaggtgttgataggatgtttaaaataaaaggtgatttatgtagcattacttgttagttagaggcatcatagcaatgttaaaaggtggaaattgtgttccgagatacatgaatatgtgtttggttgttaaattaaagtttaattattcatttgattcataaagcgagttggcattaattgttttagtccctacactattcaaaattgtagggactaaacctgattataaaagtgtatgtatagagagtaaaaaatgtatgtgtaaagataaaatggattaaaaagtgtaaaatgagttaaaagatgtatgtgtagggattaaaagaagtagtttgtaagtatatggactaaaacataaaaattgtgtaaagatcatacaggtaaaagggttaaatgagtaatcaaatcaaaataatattttattgcatatttttgtttgttacattagtctttgaggtctttgaagtgggaactaatttgattgaagaaacaagtattcagggattgagagatcttattagtatttttcttgatttaaggattaatttaattaagatcacaattgggcttgaaagagcttatttgagttttttatgattttttttaggttaatctaatttagatatgttattattggtaaaaaaaaataattagaatgtaatgatcgtttaaaattttcttacattatcattcatagattgttatcatgatattacatgaaaattaaactaaaaaatgtttctcttttcctgctgtaagatgtggtttgttgaaggaatggttaagtaagaattttttgtttctattttttaaaattttgttgttgtctaattgcttcagctacttgcccatcaaatgtggttatttaaatatttgttctagaaggacgggagtaaaactctctttcttttgtagaaaacgggttaatgaaattttattctctcatggaaaaaatttgggttgttgtgcaactttgtatagttattgcagtatttaaaatcatggcatttggtatgctgtattttatcttttgattccttttcacccgctgttcatgcatgatgtcactgttgatcatgttatatatgcattcttatgtgttgttgttcttttaggacagtattttgaagttctaattggacctagacctgagccgttatggaagcagcttagtaaaattggagttctgtatgccctggagccacttttgactattatttttgttataaacatgaacatagtgtgggagaaaattatgtcaacactaagagctcagatctttggaagaatattgattcaaaaggtgaagttaaatctttcttcctgatcatttttattttctttttctattcataattattatttctgtctgataataatgcttggagatagttatttgttagaatgtatatggttgtttgaattattttatagatgttgttttgctttgattgattaatcatatagcgttttttttagttgtgcagatagaattttttgacaaatacaacaaggtatgtatatggaattactcacattacatgtgcttttacttttccatgtttgtgatttgtctcttgagatatttgggttgagacactgtgtagataactcatttttctgtcacttttacctgattgttgtgcatgatatctatggtctttgtcttcgttccctccttttagtgcttctgtcttctttctttgtatcccattgattatttccatctattgctgtaataacttatctgaatctctttccaataagatttggtaaataccaataattttttttaaaactataaaactttgattttattaagctatatagtatcagttggttttttgtttctttgcttaatgatagtatactaacagagtaggtgctaaaactattgcacctgggtttggttcttatagattggtgaactcacaggtttgttaacatcagatttgggttctcttaaaaatatagtcagtgagaatgtctcaaggggtctcggattcagggttatctgaggcaagcaattctacataatcatatgttaaacacgtaaattaattggtgtagattattcaattgaaggatatttagataaatttttttataaagactacaagtatagtctaaaaagaagtaattgacactaaatattaacttacagcagtatataattatctttaaacattattagttgttaattttttaggtaaaattgtaaatttgatcccccaatttatcttttatttgaattttggtctctctttaaaattattgataaattttgtcttcctatcttatccgatcataatacaatcttgatcctcaagttcagaattaagcattgacattaacaaatgaatattgacggtcacgtgtcatgttcttattggatgatgactgttacatgtcatgttctatagatttgatattcaaacatgacacgtgtgacagttatcatccaataaaaataagaaagtgacacaatcaacattcctttgtcacggataatatctaattctgaactggggacgaagattgcgtgattgaataaaataagagaacaaaattcgtcaataattttaaaaggaaactaaaatcaaaatttaaaacaactagagggacaaaaatgcaattttaccatttttttaataaatggtaagtgaaaatcattctcacatatatgcaccacagagtttaatgtctcgtgctaagaaaaaatatccagagaaataggattatgtgaataaaataaacccaacagaagaatggtccaacggtatctgaaagcccaacagcactagagagtgattgagaggatatgcaccaccgaagcttatagatgagaacaacccaatatcaaacacaaccaccactcatttgttgataaaaataaataatacttaataatatatgaagaaaatgactaataattctataaaaaaaactattaataatttactttcctcgttataaattatgatatgaagagggccggtaacatactctgtcacgttctttttattacacttttatgaaaaatgtattaaattataaaaataggagcgaaactcattaaataacatgcaaaaatcacaataatttgtgatttcatagtcaaggtcaataataaaaaaatttaagatgtcacttattatgtgacgaaaggagtaattatatagtaaaaaaaattacttattacaaatttaattttaacatactaatctatataataaaaatatttacttactataaattttcctatataaaaaaacatatcatggcacaaccacttggccagaactgacagcactgtaccgtaagtcttattatctccgaaagctttctaagaagagagagagagagagaggaaatgggtaaggggggaatgtcaattgatgaacatggagaaggcaaagaagagaatatggctgcttggcttgttggaatgaacactctcaagattcagcctttcaagcttcctactttgggtattcattctccttctctccctcattttatttttccttttttttttccaagttcctttattgatgatgattgcatatttgcatttagtattcaccaagcttattttcaaatcatttgcttacttaattctgtgttttggaaggaccccatgatgtcagagttagaatgaaggctgttggtatctgtgggagtgatgttcactacctcaaggtagatattagttgtacaatgacttatgaaatatttgatattttaaattattttttgtgatttttattagatatcttactatctggttaatactttctccaaagaaaagtaaaagccagaataaaacggaaaaatcgatccaatccaaactgatttagattggattggatttaaattttaaaactaactgattgaatgatgaattaagaaaacttatgtgttttaatttgatggtttttcttttcaaaaccgatatgatacaatccatgaacacccacatcctatgttggaggtgtttgatgatctatgtctgtaattaatctgctacgaaatctattgagttaaatgagcaatctatgattgatttgatggataattattttattttccacatttgggtaagacgaggatttgagatcttgttttggttggaaattttaaatggagggtttatttcctgcgtttatctatgttttctctagtgaaaagtttcaaattttgttgtttcatttactttcagacactgaggtgtgctcactttatagttaaagaaccaatggttattggtcatgagtgtgctgggatcatagaagaagttggtagtcaggtaaagagtttggtgcctggtgaccgtgtggcaattgagcctgggatcagttgttggcattgcaaccattgcaaacacggtcgatataacttatgcgatgatatgaagttttttgctactccaccagttcatggttccctggctaatcaggtttgaaacaattcacttctcagagtattattctttcagtcatgtgcaactggaagtatacttggcttttctaaataattagaattcgaaagaaacaatgacaagatcaagtcaaatctcatgcaattaaataccacatcagttaacaaaactgccttagaatcctaaaaaaaactctgactgacttatattcttgacttcagtttcaaaattatatggttataggtaatgttatctgttgtacaaatcatcagtataatttcacaaatgcttttcattttagaagtgtgtaaattcaaaccatttaataatataaattggatggttataggcttatttgggcacatagtatattatatctatgagactatttgttatatgcatcatcatgagagatatggcatatccctcaatgttgtgcgtcagtagtattctttttcccagattaagaataggttaattgatggaacttttgaagaaacaagtaaaatgataaaatgaagccaatgacccactggtttcacgtcaatgactctcaataacaagtgggaagtccctttgtcaattcgctctcctgccattgatttatcaaacacctaaaagaagaaactgaaaatataaaattccatttcatctttgttcttattctcattatttttttatgtatagaaagtcaatatttttagatttactttaacattaacaaaatggtagcaagcagtgtgcactttgactcttgattctacaacagtgctatatatgctcaaactcagtagtttgaagggtatactttttaaaatcaagctgtgaccttaaaaaccaatggaaatgtttctgtgtagacctcttcatatcttataattctgggatgaaatatactatatgctaccgtctcaaatgactaattgatttaaaaaataaatgtagttatattcaatccagagtgaaaaatcatacatatatctaatttccatgctgtaaaagtatcaccttacttccttttttgtgccataaaatgattataacaaggtaaatgatttctttagagaatattcaattgcataaacctttgaatgtactcagtttacagggatgatatgctggctagtttgagcacttcaagtttcatacttaatgttgaatatgattttattcagtgtgaatatgtgattttttcattggaaaatgttctatttaaaacttcaattgctttgatttctgaccatgtcattggaaatgaactttttctgtatattcttaagtttgagataatagttgtttcacacgatcatgactgataaaatacaatataatcatgattttaggcaccatacacttaaaactatgctatagtccatatactcaaatgtggtgaaaactccaatgaaaacccatgtttgagttgcctttttctctttacagatagtgcatcctgcagacctatgttttaagctgccagacaacgtgagcctagaggagggagcaatgtgtgaacccttaagtgttggtgttcatgcttgtagaagagctaatattggaccagaaacaaatgtgttgatcatgggagcagggcccataggacttgttacaatgctggcagctcgtgcgtttggggcacccaaaacagtcattgtggatgttgatgaccatcgtttatctgttgcaaaatctcttggtgcagatgatattattaaagtctcaacaaacattaaggtatttagaatccttagtttccaaggtcttccatattttcttctttaacaataagcaagttggacaatcccattctgcaacactatttgcatctgtcattacagtaatttgcatgtatgtttagtggctgttgatgctgtagaacaacgatttgataaaaaaaaataatgaaattggtattttaacacaatgctatcgagagctaggtgtgtaataaggaaaactgacaattcactttcagtagctatctgtttctgtctccattcatcatttcctttacattcagttgacacctagttgtttacattttatatgttcttttcattgaaagaactgttgtttcatcaaaacttgttactctcccttctgtagtcaggttttagtgcttggtttctataatatgtttttgaaataatgccatttaaatgtgtttgtgtgacacatttatatatttactgtgcatttctgtgtgcttctatgagtaccattcaaaccatattttaaatacactgctttgcaggatgtggctgaagaagttgtgcagatacagaaggttatgggagctggtatagatgttacctttgattgtgctggttttgacaaaaccatgtctacagcactgagtgctactcagccaggtggcaaagtttgcctagtgggaatgggacattctgaaatgactgtcccactcaccccagctgcagcaaggttgattttattaaaataataaataaataaaagcttatgtcatttcttacaaactatttatgcacagatacgatatgtttattaatatggggatatgattatttaaaaatatataagatatgatacacgttcaatacatatgtataaaaaatcataaaacataaaaaatatataattgcaattttgcaaattcaaattaagaacataatttttggacattgctaaaaacaaaacaaaaattagaaatcattgttagcattataagaatagtctcagtctcattcctttcttgaaatcatccataagaagacaatttccattttcggttcatcaagaaacaatgcttctaaatttctatattttacatgcttctattttccaaatgtagttgtattggattttcatcacatttttaaaggcttggatacttcactgatacataccgctgatatatccaagtatgttggtatcaaatacatatacatgatgcaaattgaaatatcattgtttcacaggttccagataaaataataaatatacatattgtatatccgttttaataggcatttcttcatgacagaatgatttaagaaaaatacatgtcatatgagttgttttatttttcatgccttaatttttcatgtaacggttgatagtgatggtttatcatacataatacagggaagttgatgtggttggagtttttcgctatatgaacacatggcctctttgccttgagtttctaaggagtggcaaaattgatgtgaaaccccttataacgcacaggtttggattctctcaaaaggaagtggaagaagcctttgaaacaagtgctcgtggtggtaacgccatcaaggtcatgttcaatctttagatactggactgtgactttacaaactgtcgtatgttgaacaaagtaggtaatttacatgttcatgctcatgttaaataccaatgtattgataacacgggttatgaataaagtggtttcaagaaggacttgtaaaacatgtgaatggtaactgcagcatctacagattcagttatgaggtgaaactttttcttaatatgtaaatgagtaaaccctcaaatttgtctagtagtaattgagaatttcaatgcacaataacaaactgttgcttccaaagtagaagttcttttaggttctatcaacttttatccaaacatgtactaaaactttatttgtggttcttaagaaatcatgattgctggccacattagtcattttaaggaattagcatgttctttgcttaaggaccaccgtgaccaacaattgttaattctttgtgggcaatgagtgaatgtttatattagaagaactaatatgtccacgttccaaatttcattagaaattatgaatgatattgtcttctctgcactcaagggtagtgcagcaaaaggttactgacatgtgaaagaaggcaaaaccagtaaaacataattccctcacttcaatagggaaccgcagattggttcatgcataccaattcacaggacattatgaaactggtttggtaaattttagtgtagtcgtgaaagcaatgaatcgggaaacatcacgagtttgactttggaactcttgaagaacatcaacagccaagcttgttagttattagttgttacagagaggaagaaaggatgttcaaaggataagaatgatgcctttaaagagagagaatccgcagtcgaaatgaggagattaaaaaggatgattttgtgttattcatgacttggtgttgccttcaataaactactgtattcgtttattttcataaatcaaagagtaagatgaagttatgcatttcaaagcagctggtagcctagctagtgtgctttaaataaagtgataaactactttttaaaaattaaaaagtcactcatttattttctttagttgtccaacacttttcttgataagactaacttggataacttaaaatataacaaaattttctaaaggaaatgaaaaaaatacaaaatatataaataataattaaaaaaatgaaaatattacgacaagggattgtgttattgggtatgcaaattttaaaatataaaaagaagaaaaaacttgttactcaaaccaaaaattattagatttaaatgaatcgagttgactacttgacctggacaatactgaaatttaaactaatgtatttggaacggttcagactcgtggttactttgaacacccctactaaagcaggacttggttgcaattataaaactgattaccaattgaaaaaacaagaaaagtaaagtaacaaaaaagaactgaaatacaatgcaccgaataaataaatggcctgccacagccaatcattttggactggtccatgatggacaacttcgccaccagtacattctaaaagccattaacccataagtcaaaatcacaagttataggtcattaatattgtccattctaaaagccattaacctataagtggttcatcctttagacgtggttcatgtttatccaatggctacaactgtcaatctcagtgcaatggagccaccaaaccctctgggccatggatactgtattataatattgtattcataatagagttatccatttgtaagtgtagaggttccagcaccaaggagttgttggagttatgacaagttatgtcgtatagctctagaaagatagcatgacattaaaatggactttctaagttttcgtatgtgcattcaaaagaaaacgagttaaatcatatttatatttcgtcaagcttattatgatcaccaagaaaagaatacaacagaggaaaatgcaagacctcccagttacttgtaaataacaagtaacacatttctttggtggtatatatacgcattggagggtgttaagtaatgctaaacaatgttgtgatttcacaaaatgttacattaataggcacgcctacttgagcacagctttgtgccaaggatacttccacagctcagattcccctctctttttctgcaaacttaaattacacactcccgttacctgtctttttctgcctcttcccaatcccaacctcagcccgaattcccttcttgcagctaaaaaattacaaaaaggaagaccagaaaaaaaaactagtaaaacaattaaatggaacacattgtaagtgccactttattgggtggtagtagttgcctccgctatccaattccacactcttacttcaccagtaccgtcaccagtgaagaatatgccgttaggccctatctgaattgctcgtacctctttttttgtcaatatcttgcctctctctgcaaatctgaagaaatgggacaaacaatgaataatgagttcccttctattaggcatcggggatataaaaaataacgtcacagtgaaaatatagtagtggagaaaataggaactgatacactatttgggtaaaatatgggttttccttatacagaaaagttattacaatttctcttcaaatggtcaaaacttgctttgtattttgtagtgaatcaaatgagagcatgaataggaagtcaactacttacgatggcagatcatagaggtgcacagtattatcattgcaagcgcacagcaaaatgggtttgccttgtgaatcatgcatcccacatagggtaagtataccctgcacaccgataacaacatcagaaattttgtgaaaatcatctcacacacttaacaattccacaaagccaaatttcatgtgcaaataattactgtttagaatgaagaatagttatataagaactaaaagataatatcccttgaaaatgatagtgcagcaaatgagtgcacttagaaatataaaatgtgtaaatagctcattgaagtataggggatagcagcaattacagatgcagagtggaaagcatgggccacgtccccaccctcctagatgtttctagttactataaataaaatataggcaaatattggacttgcccccctttattcattttggtgacttggtcccctttttctcataagtaatagattgggttaaaggattagacatcgtgctcctttttacgaaacccagactttccattaaccccacttatcagaagtgttccaagtaataggacacttaattccagctgcatagcttcttgaagttagtgaagtaggaaatgttgtctgagaaattgaaggaaaaaaaaaaacttaaaagtaatggtaatttcttgttctctctctacttcaaatacaaatgaatctccaactccaaaacttctttccctttggcttataactcattaattctgccctatacaaggctgctttagttgctatatccagatttgagtcattttttattttgtatctggttcctatgcctcattatttgtgaggatggaaatatttagaatagtattatcaccaaggaatgactttaaaaactaagctacaacatctatatgccattatgcccctttctggtcaagtacctatctggttgtatgcaatactgagccaatttcatcatcagaaacttgagcacatttcttatattttctaaaaccattaattcaaaagagtagtagctggaacattgatagcagaggtaagaattgattccacacaattctgagaaaacatcatttcaacctggacaagcaatatcatattaaaatagaaacaactatccaggggaaaaagtaattaaattaacaaatacattttcttcgttgtgagtatatgtcacttccaagtttccgctttcagtagcataccatacctgcataaatcaaataaaagttaaacaaataataattccagaacttgcatatagtcaatacatatataaccagtaaatggtgtgaaaaccaaccttcactgttttatccaatgaacaagataaaaggaattggtcccagcagagaacagacatcacaacagatgtgtgctctgttagtgtctgtaaacactgcaaggtttcaaggttccatacctaaaagacataaaccagttggaagaaatgtaccaaattaacaaaataaaacaaaacctattaatacattacttagagtctaaaggaaaatgaatcaggcatttatggcaaagagcttatgtaaacttactcttattgtattgtccattgaaccagagtaaagtctattggcaccaacaactaatgaaacaacaccccgagaatgacctttaagtgatgcagccggctcaaagcagttggtagctacattaaacttccatgccaatatagatccgtcctgcaggagaagtatttcatttgagataaaaaaaaatgatattacaaatatgtagacaagtgagaaccttttcttgtgtattctgttttcattttcaataataaaaaaaaaaaggctttgaaacatgtttggtccagtttaacaaaaatatttcacaagacattataaattcatttactgtttaggagttaaaaggcacccagctgacttaatagttaataactaaagagtttaaacagatcatcacagtctccccgaaacaaatccccaataagtcctccttagacacaatcaatggcctatagactaatccaagatatccaccagtaatctggaatatcccacatatccaggtgatgactgcttcaataccattttgtcacacctaaagcccaactaagcataagacaaatcttcttggccaatcacattgcctaaaagactaatctgagttgttttattagctagtaatcagtgctagtcattagctgataatcagtaaagtctaatccatgtaaacacagatgaaaatgcactttatcatctcatctaacaggtcctaagcataatcaacatttaaatcaggactactgcatcaaaaaataaagcatgactctaaataaaacaaaacattgtcaaaggaaaagaaaatatttacctgtgtaccagcaaagagcatatcattattcacaacaagtgcatatacttgtccaacaggaccattaagacttagctctgataaattttgtgtgttccaggcctgcagcaccaatatcattaaccaaaataacattaattatgatgttataagcagtggaaagagcataccttggcaaaaacatgtcactaaattagagagatatactttgtttaaaaattgacagtacaaaatgagagaaaaacaaaaagagatccctatttgtgttctttcttaccttgacaaaattgggtatcccaacaaagacccaagggccttcactgatcatacaacctacttcaccaccaagattgatcacacctacacactgcaaaggagcatcgacaaacgaaatcaagacaatctcaccactccaataagctcaaaagaaaactataaaagcttaaaagaaaaatacaatgttcactgctgattttgaagtctgaaatcaaaatagagaggagaaaaatgaagccaattgaaataattgagaaaataaagaacactacaatcctgtgttacaccaaaaatatccccgtttcacataaaagtatcatagagaaaagtgtcgggcactgatcatcaggcataaaatatgcatatgccaaaaaagtttgttataacataaacatgagtattggagtgtaagcagcaaaaattggaatgtagaagggttaaagcaaaattatggttgatcatctagagcttcccttttgtcaaagtaactattctattggagagaatcacatactttggctttcaatttcaaaaaatggaaaatgcaacccaaatccaaaaatagttccccgaggaaattttcaaagttcaaaagtgatcaaatacctaagagaactaatatatctaggaaccaatacaaacataatagtttcataaaaaaatgcaaccaaacaatttgatgtaaaagaaataaacaaactaattgtgctattaaatgtatcaagaccacaataacaaagcagcaaatacaagttatacaactatatgattcgacctagcagtcaaacatgcatcatgatggaacaagacatgcttcacctagaataagcaaacaattcaaattgaaacttaaagtaataaaaaagattctcctattccaaggatacaaacaaaatcatgaagcttaacattagtggaaaaagaaaagttgtctgtaactttaaaattgaaacaaaaattgcccctagaaaagaaaacacgaaacaaataataaccacctttccagattggcagtcccaaatccttgcagtctcatcagtgcttccggtatacagcttatctgaaccagagggaaaggcaattgcactcacagcctgttcattcaacaaaaccacaattcatcccatcaacaccaatcaccaaacagacacacaaacacacacttacttgtaaacaggatatcaaatatcaaaattttcacagagtaacattaacgcaaacccagttcacacatcacacttagccctatataccatttaaaacacgattagaattaaaaacacacatataccataaaatccaatgataaataagttatcaagcacgggtttgaaatgattcaaggaaacagcccacaaccgcaattttgatcacatcatcgaggtttttggagacaccaccgcaaccacaataatggccacatttgtccacaatttcccacaacatcaaggatcacaacaaaactgcaaccataaccgtaatttaaaacctttcactatcaagcagagtgtacactatagaatgcagttcctccaaagtaggcaaatcactttattataaagtacaatcaactgtcaatatcagtaaagtacctaatttcagtcattgatgagcaaatcaacggtcaacatcacacatacgtgcgtaacaaatcaatatccatcattgattttctcatttacagttgattgagattaattactttaccgttacatttagtggcttcgaatcctatactatatactaacataattatccaataaaaacctttttttttggttaccttctgatgcccttcaagctgggtcagcaaagaaaacccatcccccacactccaagtgtgaaggaacttgcacctctctccataactacaattcccctgaatccaataattacagactttctccgccttcaccaccacccctctaccggcaccggcaccggcaccaccgccaccacggctcccgccacggccccacgtgttgttgaaactggggctgcggcgcgggcccgagaagcccgaattgtcgtatgcccgcttcgaggaggcgccattggcgtggtgagaattcgcgggcaattcgctgtgcaggaaggggcacgggtagcggttgcacttgcccgcttgccagtggaagcacactttctggtgcttggcgtccccaccgaggcggttgtacacgcgcttgttgccaccgtccacgtccatgatcgaaacagagagtgtgtgataaagtgaattgggattcagggatttgggggtttgaacgagtatttattctttatctttaggtgcgattggaagaggaataagggatcgagggttgctattgattggggaattgagaaggggaggaagggaaatgtagagtgcgatcatcaaggagtgaagaatgagatgagaaacctcaatagatgatgagattagggattagggttcgtgaggaagagagtgatgaattgaatcgagcaacagagttggggaactacacgtaagccgcgactgaggtctgtagaaacctggtggaattacggaactgtcctgacttgagcatgccagaacatgttaagagagcaagtgtaaatggatccaagttaacagatgaaaaaataaatccaatcaaatgaattgggttaaaaaataaataaaactcgatttaatccaaatcatttgtatccctggtcattgtgtatcaaagcatatgtatgacttcttcttcttcttcttttatttaagaaaagaaaaggaatgttatattttttgtgaaaaaatatatattcaatggtattcaaagtatatattgaatttttcttctgtatttaatttgaagatttcaaaatatttttttttggagtacactaaatgcagtcaaaatttctaaaatatatcattagtattttaattttattaatttaacactaaacctaaatcttggcacttcctttctttatgatggttttctctttgtttgtctctctttcttccttgtgttcttgcttccacaattgaagatggtgcataagtgtgtttgtttgcttcttacttattcttcttgttcaatttggtaaatatacatatatattttatttgcaaatgctaattgttagtttttattaataaaaaaaatcaaattgatgactttatcttcttttttttatcatccaaccaatcttatattttcatacaaatacatatacatgatacatacaaaaaaaaaaaattgttttgtagattaaatgtatgtcattatgctctcttgctttccaagattactggtctgattcagggatggaacaaaaagtctttatcttatgcaggtaagttagagttgatcagagcggttattcaaggaattgtgaatttctggatgaggatttttcctttgccgcaatctgttattgatcagatcaacgcttcgtgccgtaattttttgtggggcaaagcggatattggcaaaaacaagcccttggttgcttggtcagtagtttgttctccgaaaaaagaagggggtttaggcctttttaatctcaaggactgaaaccttgcgcttctttcccgtatcctgtgggactttcattataagaaagattctctatgggttcggtgggttcaccattactatttcagagggagcgatgtgtggaattacaatacttcttcatcagattcagttttgataaagaaaatcattcaaataagggactttattatctctaaagagctaagtatagaaggagtcaaaaagaggattcaatcttggagcaccaatgaacaattgcttgttggcaaagtctatgaatacattagaggtgtcaagcctactgttagttggtgttctgttatatggaacccaacaatcccccctaagatgtctttcattttgtggcttgctaaaaggaatcgactgcttactcttgacaaagttgcttttttgaacaagggttccctctgtcctttatgttcaaatgagcctgagtcaaatgctcatttgttcttttcttgcagaaaatctcttcaagtttgggctcacattcgtgatttggctcctttccgcaagcgtttcacttctttacaaggcattactgactctttagttaggggtagatctacataaggtgttcaaggaaaattacgttgtctggctataacaattacagtctactgcatttggctgtctaggaacaagctgatttttgaagattatcaattttctgtaatagaggttattagcaagattaagtttcttatgtatatacaagcgcacctgttgcatttgttttagcatcttgatataggtcttcttgtattagggagacttttgattttctttaactgcggggtatgccccgtttattattgtatcattttgggggtttaatataatttacatttttttcccaaaaaaaaaaaaaaatttgttttgatatgaaaatacaaattattgacaccactcaaaatggcaaaggtaattatggacataaaaggttttttttttattttgaaatgtatttttcatatatttaaaacaaattaaaaattaagaaagaaaaaaaaatatgatggaaaattataatatttctaatactaatccacacacctttcttaagaatgttgtgatggacagttattatgtaatttcatccttttgcttataaaaagtagctaattgttgtaaattaaagttaaacgcatcctaaaaagaagttaaactagctatcactcttaccatgtaccttaagaatgtcatgactagcaattattatgtattaatccataaaggtttaaggttttgttaagaagaaggagacagtcaactaaaacatttttaaaattgattttttttttacaaaacattgtttcattacatcttttaaagatataaaataaataaaatctaaaatatttgcaaaggcaatcatttactaattaatattttctggaaacggaagagagcttaaaaaataaaatcaatagcaagactctaattttctagaattctagaaacaatagttggactcagtaacagcaacaacgcaaacgtgtcgctagagatgaagccactaccaccaaaacatcaattccaaaaacacaagcaatagagcaagaatctaattttctgcactcataataagttaaaattatgaattttaaaacaatagttataaaattaacaaacttaccgtatttaatattttataatgaaataataataaaaataatttaaaatttgaattaaattcataatataatatgtttttctaatcataaatgagattctcactcttttaatctttcatttagacatttccatggtattataaataattgtttctattttttatggtattatcatgatttttttggagtaaatattttgtatttatagggatcaaagaaaatattagaggaggattgataacaatatatccatcctatttaattaattaagttagttccatggtgaagtagaattaattctatacattattattcaaatacattattagtatactaccctctaaacacacaagggtacaagggttcacttcgtggttaaagttgggatagttgcataagattttaggttaaaatcttgttgtttttattataaaaaaccagtagactacctgtacaatttattcattttctttttctcatattattattattattattattattttagttatataagattaattcagtgatataaaatttcactgcatttatataaataaaaataattgatagtcatccattaccaacaaaattaatttctgatgtaatacataaaaagacacttgtgtactctaatttaagaccaaaaatggttatatagtcactattggtataaaatgattttacatactaattaatcacaattcacttgataaaactcttaaaatatttatcttaaaaagtaaataaatttatcataagataaattattattagataacataaaaaaaaaacacagaatctggtggtaacaatgagtgtgaagtgggaggggatttcattaaactaaattagaagtcggtgttggcgtccgaggagccttcaatttcaaaaagtctcaaccaaacaaagcagcagcaacaaaacacaacaacaaaagttggtgttactgtttattgttgttagtgtttgtgttgagtctctcaactctcataagaggtccctctttggagtcccatggttgctctctcttccgcggagttcaaccactgctccaacggcctctttctctctcttcccttcctctctcctcagacccacccttttccacttgttaaggtttctctttgcagcaggtgagttttcttctttgtggtggatctggctgggatggtatgttttttggtggactttgatgtgtttgtgctgttttcacttgttgtattgtttctgtgcggtttttccttctgggcttgcggttttgtcattctggagtttattgaggattgctatggaagtgattcgggttggaatttgctgttggtggcttaaaaaatgtttttttatttggtttttcagttgggtgtgtgctagttctagaagaatctgtcactagttttttttttgtgtgaaatttgaagctggggatggttgaatcttctaattattgtgacttgtgatctgggtgtgtgattgggagagggggttgttaatgtttgctgtgagcatgtttagttttttattttcttagtattgtgaagggtttgatgtgagtctcattgttatttttttctgtagatcaagtgacttgggagaagggagaaaagtggtcctgagttctgactggttcagattcatggtatcgtgtgccatatggtgtgtgttttctttgtcaaatataacgtcgttaagcttgttcaaagattttgactctgaaatggaaggttttgttgtgtaagtgagaaaaaacaaaggttgacctttgttttattttggtgaagaggctggttctgtgtcttgaactgcaggtttaacaattcaacaagagtattcaacaagagttttgttgaggtaagcaaattgagtagttacttgttatatttcttggtttgttgaggagggagggaattggtatggctgttgccaatagcaacagcagcaatgaaccttgtgcttcatacaattgttacaaagtagcaggcttgactgagaccatattggacataagtcacatctctaatttaaaggatcggtacattctcggcgagcaattgggttggggacagtttggtgtaataaggacatgttctgacaagttgacaggagaggttttggcctgcaaatcaattgctaaagataggttggttacttcggatgatttgaagagtgtcaaacttgagatagagataatggctaggctatccgggcaccccaatgttgtggatctcaaggcggtttatgaagaggaaggttttgttcacctggtgatggagctttgtgctggaggggagctgtttcacagattagagaagcatggatggttttcggaatctgatgctagggttctctttaggcaccttatgcaggtggttttgtattgtcatgaaaacggggttgttcacagagatttgaagcctgagaacattctcttggcaacaagatcttcctcatctcctattaaattggcagattttgggcttgcaacctacatcaagcctggtacttactttctcttcaatttgcgttttataatctttttttcaattttggttgctcctatgaatatgtgtgatgttcatcttcaagtattgggatttgtttaagcaggtcagagtttgcatgggttagttgggagtccattctacatagctccagaggtactagctggtgcatataaccaggctgctgatgtgtggagtgctggtgttattctttacattctgttgagtgggatgcctccattttggggaaagactaaatcgcgaatttttgaagccgttaaagctgcctccctgaagtttccatcggaaccttgggatcgcatttctgaatcggctaaggatttgatcaggggaatgctctccacagacccatctcgaaggctcactgcccgagaggttttaggtaagcttacttcttttcttccccttgctaatgcctatctgccaaagttgttttatttagatttcacattggagttaagatagcatttttgccaaacaggataataatgaccaatcgttcaactgatatatatatatatagagagagtatcataaaattgaacataaaaagatcattaggaatatgctaattatgcttattgaaccaataatctgaaagttctgaacatttagattatgacaaagggctcagcaataaagttatgccataacaccaaagagaaatgctggcaccacactctctaactccaaaagctattaaaactaataggttttatttactgtatgaaatccatcatattatgtcatttatggtgtgtgttcaaatgaatatgtttctctattttttttctgaactttccccttctagatcattactggatggaatgcaaccaaacaaatcctgaacagctaagtgaatgtaaaatccgaaattgtgaagaatggaatgctggtggcagctcattctctgcctctttaatgtccaggagtcaggacatcagttttggtgccagctcacctacttgtgacgctcaatcacctacattcacttgcagatcatcattttcctcttttttggtggaaccagtcactccatgtctagtttctggtgggttttcattcaagagtgcaggcgattcccctgatttggaattttgttctcccgttccctcaatgcttagcttttcattcctcagccccagttctgttgttgagcaaaagagttgtaaattagagtgctcagctaacatggcagatgtaaatgcaattgctggaggtatgcttaaagccttttattttcatcgtctttactatttcttagcttcctggtctgatcttgtttgcaattttatgcagaaacaaacttgggaaaattgcttatgctacaagattctcctctttgcgttggacgtgaggttaaagaaacggatcgcaagcctgtagaggccaaaagggcaagcggaatgaatggacataaggtattgggaatccacagcaagagaaacaggacaattggactaggtgagtgtgagcaacttgaccttatggtgactgaatcagtcattcgttggtcatcatgcactcaactacctacatctttgagatcatctcttgtctgctaagcggatagaagacttgacttgttaatcggattgcttcatgccgtgcctaaattgcagcatacttgacgcaaattttgctcagctaacgcattgtatatgttttccttatttgcgttgttgttaatgttaactgtcttctggctggtgcaaagttttgtttagttttggtagtggcttaatggtgtgtctgattgagaagtggtactatctaatttctcactttcttgtttttcactttttctcctccttttttccgtctcatgttatttgccttgagtgtgagtaaaagcctgacggcattcattcagcctggattgtaaatgaagttgatcttgatgtatgctccagttgtcttaatctgatgtattccagtcatcttgatgtatcagtatcactatcactattagtgtgtgtttggtttagtataactgatattttttatacttttatttgttaattttttagacaattttgtgtggttcaaaatgatctagcttttgtgcttgtctcctttctgcatcaaaagaaactctaactaatactaatcttcttgtttagtttaattttggatttcaaaatgaagttacctagaatgcttataagtcttgtaaattgttatttaattataaaccggtaagattattaattttgtaatatttattttaaaagtcgtatttatatattacggtacaatttatgattttttttatatataaatagtactagtagtttacttatgaactaagctgtacttagtaaatgctgatatttttcgtgacaattaatgaacttaggttctatcatttcattcatttgttgctgtccacatattaacaagtgttgggttgcacctggcccttacattttggtacagtttgtttttcgtcttatttttcctttttgttgaaatctgcgttatgtctaaattttatggacaagaagaaggattcccctagtagtagaattaaatgtgttgagccactaagccagctggtgatggttgtaatcaattgtccgtgacatctcaactcaacaatgattaatcgttgtaacctgtacatagccacatgtgggagggaagaggagggtgggtaggtttgtcatcatttgttaggccaaaagtcaatgccaccttttgtagtatattatattataaatggcatgtattaaggtctcgatggaaatgattttgatttatggcaaccatgacgacttcgtgattccaacatctttttcttaatgttattttcgtagtcacgttttcatctgtacgggtatttttagtattttatcgaacttgatttgtctttgtaatctatcgtaggcttctacataaataattcatatgggttagtgttgcgaaaacggtagtagtaaaatggagttgaggtgttagttagtgttactctataaggcagcttgattactttattaacgacaaaatcttcttggtgtattgtaagatatttgaaatccaagatataaattcatttatgagtatgaattagagatcatagttagactaaattttttaatgaatatttataaatttattagaaatgagtaaagcattttatccattaaatgagtttaaatttggactcaagtaatgatctgtaagaaattgatggtactagtatgaattgccacaggtctattatagaagattttgtcattgttttagcgtggttttccttcatgtattggagagtgggaatggacctatagagactactcaagtcaaaattcaattaaaataatgttattaatgtatgaataatgcatgtacggttgaggttgtcatagggtttttatagagaatgctgatggtgtattcagtggttcttcatctatagtttattacttctcatccaaaaaattcgttgaagaaattacaatgatagtctttcatatgtagggcttatgtttgtagaggttgcatatgattcacagcattggttgtgtgatttcaaagattgatagtcatgcgacaaccacatttaatttatccttgaagattgtcatgtataaaggtaagtcgagtggctggtgagggtacaggagctagtaatatgcctagtagagttgtttagccttattacacttcaagaacaattatcatcctttagaattccaaacattaaaatttatacttgctaacttatcattaacttaatcaacaattgtggatataagcatttaaataatacatatatatgttaattttatacttgctaaacttattgttatctacacatttttccatatttcatatttcaaccactattaatactgatagttcttttttctttttttcttcttctttttctatctttctatcacatatataacctataaaatttatacatttttttctttctttctagtgttaagtggtattccctttccagttatatataaataaaaaagcgatcttatatacatgatttaagtaattttatcttatttaatattatcatttctaaaatattttttatttaattttaattctattttcaatgactcttttttattcatgatatctaatttcagatattttagaaataattttatgtttcatttgaaattaataaaattaaatgatgttaattaatttttttaatcagtataaaattaattatttttgcctatatataaattcaatggaagtataagagtgcctcacatcattttctttcaactacttttaactaaacctttgagaaactataattttaatatatataaattaaaaaaagaaagaaaaagaaaattagatttctaaaatgggcacatttactttgcatcaaatcatatgacttgcaaaattctacaaattatgaaagagaaaaaagaaaaatgaaagaacaaattaaaggtcttgcaccacgagtgtaaagtacaagaccaactgttttgatagtgagggcctattcaatatggtgatgtgaaagatgctactcctctagctaataacacgacacagccattaataatgttacatatgataccgtcgtttctagccagacagggaaacacctcaaagttaatgtctcctttgtcaaaaacttcacacatgattctgtccctggacctcttctaccacatcttttggggacgacacgtaaatgaaattgggatatcccttagtttctaatgcaactttttatttatttattttaggtataatttgatgcaagtacctcaaatatacaactattgtccaattcttttggtgacatcctatagcatgaacaataagttaggcattggccccagcttcccactttgcccaatgatgtgactttttttttattatttcaaagaaaactttgatacattatgaatacatgctatgctataattgcttctcaatattctcttaacacaatgatgaatttaatgccaagactttggagcagacgtgtggatggcataacaacatttgcttttcaaaaggtacttttaggatgtgggtataaccgtagtggcaactctttgtatatgtattaacacaaagatatatagttacataattattggattttataatttatacttaaaataatatccgtgtttgggctttcaaagatcctctaagtccaatattgtaaagattgctcatggtagattactagattatgaagatggcatattaatctgagtttatttgcatgtgataatcagagaatctcattacaatagttaataaatatcaaatttccgagtttaatagcattttcgactttaatgttgatgctcaattacccaattggtcagtgaaaccacagaagaatatccgagcaataatgcactagtactaaaaaataagagcttttggcatatcatacacatgtctaggcttcttggagtaaattatcataatgctacggctatatatatatatgtatacacacattagacaattaaacaagagcctgtaaaaaattcatatcaccaaaaagtttattcctgcaattagcagtacgtgtgtgatactataaaacgttcatgaggtaataaagaagaagagatctcatttgtttgcagcttaattagttgcatagagaatattctcaccaatctcattctctgttagaacttaaatagaagaagaaagttcaacccaaaagactaatccattaggtgggccacaacacttaaaatattagtttattttattgaatgtgagacttttaatatttttattctctttaaggaccaatatctaagatgattttcattttattgacattgatccatgatagtcgtccttttatcttttactggtttattattattcgatttgcaacttaattcaatctataggtaaccttttttgtgatttaacttttaaccaaaacaccaattgttaggatctaaacacaagaaaaaaatttaacccaaaaggttagtccattagatggaagagtctcaaggcttaagtatcacattaagtaatttattctacttaatatgagactcctacgttgtttccactctcaccttacattacatgctttcttgcattatggttggtgtttaggcttaatttacagtattgtgcttgatggaatgtgaagtgctgcaaaatcaatgatgcatgagaactctttttggtttgtatgctagctaaaaatgtttatatatactttatatttatatcatgcttggtccatgtaaaggactacaggatcatgctgaaggaagggttactaatgatttatgagcgtggaagagaacgagtgcctgctgacaaaatgtacttatataccatgtctttctccaagttgcaaatttataatatgtcaaagttaacaaaactccttcatttttaatttcatttttgtgtgtaatgactacagcctacacgcactaaagttagaatttagaatttgcttatcctatacattatcaagttatgcacatttttttaatcaaacctatttaatagatttgatgtgagttcccatttgatgctttacaagtggtgtcccgacgttgatgatgcaaaaattgataacatattacatagagattggtcagaacttaatgggtatctaaaaaaaatactactgccatagggaaaacagtaattatttatcaaatgggtttgagatatgagaagggatatgtgtatttataggcaaaattttgtgaggatatatagatgtcgctatgagtaacttactaactaaccatatcccatacagcatgttatttattatattaaatttaacaaaattaaataataatattacacaaattaccatatataactaattatgctattttaaataatattacataaatcgttatatatatcaattatgactcgaacgctatataataacgtatttttttcaccaaatctcattcaatatccatgcctacaattctgttgacctacagtatctatattattactgttattatataataaatttcatcttgaactaatattgaccgttgatcaaagcttgaatttgtcaataaccgttgatagtttttttataatatctatattaatgaagaatcaaattacccacattaatactatttaataatcaattttgataattaaaaattaatattgattttttatattaattaataacatgttatttattatataattctaataattaaatgttaattttctataattttgttattaagcagtaacattaaattttggcttataaaaaaggtaataacacaaaatattgtattactactcatgaatttttataaaaaaaatagttacattaaaatatatttcacgaaaaataataatttaaaatgaatagtcaaatttaaatttactattttattttcaaatttatatatttcatatggatattacattattattatttggaaaaataataaatcatgacaaatgtcaatagatttagtattttttaaaataatacttgctcaaatcaaaatatagtctttttcttccattttaacgaattcgctgtatccatttcccttttttttaagtacacttcccttattagtataaatcctcactatactcaaaatacccctatatcatcattcaggaaagtaattccaaaattgatatttaatttttgtattttgaaaagtattttctgaaatataaaaattttcaaaatgtactttctggaacacataattatagtttatggaaaatattttatggaatataattttaattttgtatttcgaaaactacttttataagtaatttattttaaaagtactttcctgaatttaacgaaaaaacatgttacatttattccaaaatccaaaaaaatgataatttcaataaagtgacaaacaaaaaaaaaatcattctaatgtgtctatactataccatttgaacctctaacccaattacacaacatgtgcaaatcatatctttgtaagtatttttcctagtttgtatcaagataataaagctattagatatgtaaaaccaagaaaatgaggaagaaatgaatgttttgttgccatgaaagaaaattggagtgaaagaaaggcaagattctaataaaaagagatggggaatgttttgttgtcctggaaggaggacatggttaggggaagggggagtgtgcaatcgtgtgaagggaataagaaagtttgaggtaagacccccttttgtttctaatgacttgtggaatgatgacaatgagtagaatcttataatatttgtcatcatacctatgttttaagaaaaaacactcgtacctggtccatacctgcacaacaacaactctaatcctcattcttgtacctactgaatacctatatacccatatgcgcaaccccctcaaatcttcttctttctctcacacgatcacaccaccctccccccaccaaacaatgcacttcttctgggacaacaaaacattccccctctctttcattagaatcattcctttgtttcactccattttttacttccatggcaacaaaatattccttcctacctcatatttttggtttagttatataatagatttatcatcttgctacaaactaaaaaagtgcttacaagctttgaatcttcatacatggtttgtatatgttgtgtaaattggttagaggtttaagtgatggagtatagacacattaaaatgctttatttgcttgtcatttttttgaaatgataatccgtttggattttggaacaaatgtaatatgttttttttttcataaattccaaaaagtaatttccagatttttttgacttctagaaactactttccaaactacaaaattaaaattgtattatggaaaagtattttctataacctataattatgtgtttaagtacattccgaaattatgtttaaatttttgtatttcaaaaagtaattttgaaaatacaaaaaattaaacattaattttgaaatatactttcctgaataatgatataagggtatttttggtatagtgagtatttatatagtaaggggtgtgtacttagggaaaatggtggtagatattgcaagtgccttttaacataatttaattttgggctcaatttctttattcaaaaagaccatgtttggtaaaaaataaataaaagaggagtatggtccaaaccaattttgaacatgagcctaaaatagagaacccaaaagccggggttcaaactgcggagacaattaatagcagttttttttttgtatttatactttttacttatagatattagtctaaagattataatcgaatagggtttaaaaagtgtttcatttataaaatgttgctgtatttgtagtttttacttatttaagatattagtctcatgattataatcgaaacgaggaaaaaagttatgatggttgacatctgcttaaatggataatattataaattaaataaaacaatatttaaatcataactttattaaagtcaaaggatttacgcagttgtgtaagatcttgcatttacataagtagatataatctatttagcgagatatttatgatctctaatttttttaaaaatcataattttattagtaattaaactcaatataataagaaatcataagggaaaaagaaaaaaaaaaatatctcactccaatataaaactcacatgccttaattttgaagtatccaattcgggatacggtaacagactaggctcttaaaataatagagacatttattgagtttttaaatgaattgaactaattaatatagtaataaatacagaaatctaaatgaattaattagaaaaaaatagtagtaattcaatttgccataaaagttcttttcaattttgaaaaacaaagaagtccaatggacgattttgtttgttttctctgcctaatcccattaaaactgccaagtgttgattggctattgtacaaagtccaaacctcatgaaaagataagattcatagccacaaaccaaaccagcctcatattcttgattctttaggtggcttcagagagtgagcttatggttttggtaaattccattttgttcatcaagatacatttctagagttcaacctctattatcattcagcaagcaaatcacacacactatagatgagttgcaaaataaactccttaagctcaccaattccatgcaaattttacaccaacaaaccaaagcttagaagaacaaacaccatcttattttcctttccctcaagtgaaaaacagcaaaaaaccatttccaccagcacaagtgaaaccccaacaactgaggcttacactgttagcttcaagacagaaaagggttgcaagcttggcatttcaaggtatcctgactttgaatatgatgcagaagggggaatgggaactggagttggtgcaaaggtcacagagaataataatccagccaacaatgaccttcctgtttcatttgatcttgaaactttgtatattccaccactaacaagttctaccaccaagtttcttggttttccattgccaccatttttgaagattgatatagttccagaggcattccatggaagcattaaccaagaatctggcaaggtaaaacatataagttctggagattatgtttcaacttgaaaggattgtgcatcatgtgtacaactactaattagtgagcctgataatataataccttggtagcttttgtttcagcttttcttctgagaagttaagccgaatggaattttagaaaaactcttaaaaaaagtaacttatttttaagaattttaattagaaagcattgatagtgtaaagatttttatcatgttacccaatcataaatttcatgtatgagtatgataaagttgttgatttttgtaataattacattaaaagtcatttaatctgttgccactgtaaataaaattacacttatagttcataaaaattaaactctatttttaatgaacaaaagcactcgaaatagctagagttactaaaaaagctaattagagaagcttctatttttagtgagaagaaaagttgggtcaaacatggccttattttaacttgtcattaggtgtctctctaattagtttagttccataactactcaattgatagtatggttgccttggtttttttaaccaggttgatcttgagttcaaggccaagttcttgttttctgccggtagtctctataaggctcccccattgatggtgaagacagtgttgacatctgaagaaacaaagggcacaatgaggagtggaagaggcaagagattggataaagaggggaagtgcagactggttggtgtggcaacaattgaccctattgatgatttctttatgaattccttccttggtctcccaactgagtgccttgctgagttaaaggctgtaatctccatttcttcctcatcttaagatctcataaaaagatttggacatttgttgaagcctatttatagtcattatacccgagttggaaaatcaatgtgaaatagtacgagatgatgcattgtagagactagagagcagtcttaaaattggactagtttacccaattcagccttgtggcctgatagccatgtacaccacttaggtaaagcaattataatgtacactaaaagtctaaaaagaacaatgaagtacagtacagtagcattagcatccttcaacttttgttatctcagtgtgtttataactattttttcaaggactgattccgtgtataaagttgagatactgaaagattgtcacacacatatatgaatgttaagaaaaatccatacactaattgctcctggaatgtttgagtttaacctctatcatgtatttgatggtctctgcaagggagaatagcataggtttgggagcttgttgacaagatgcatgataaaggtcaatctgccaatgtaatcacctacaattcattaatcaatgcattatgcaaaaatcttcatctagaccaagcaatttcattattcaagaaaatgaaagagcatggaattcagatagatgtaccctcatacacaatacttattgatggactatgcaagggtggaagacttaggaatgcacaagagatctttcagcatcttttgattaaagggatcatctgaatatacaatgggttttgtaaagcgggcttgtttgatgaagcattggccctgctgtcaaaaatggaagacaatggttgcatctgaatatacaattatttgtgctctatttgataaagatgagaatgataaggcggagaaaatgattgctagaggcttactgtaggagtaaaaccagttgatattcttttcaattaataaataattagttcattcataacaattagtcaactgttcattttaatgatttatgtagactttccaaacctactctcatttgcttgtatatacaaacatctaaacacatttatgatactgactttgctggaccctttaagccatgggaaggcattcgaaagcagtggcttaactatgtagagactgccacgcattctcttgaacacccaaaacaaactctggagatcatgatcaagtggcagccaccttctcaagggtggtttagcataaacactgatgacaaagtccagggtcaggatggtatagtaggctgtggaggattaatcagagacgccaatggacatgtttgcggctttgcaaaaacaaataagcttgtgcttgatcttcattgcggagcttatgaaggtctttgtatggcacaaaatagaggccttacagccgtgggactcaaaatggatgcccaaacagtgagtcagagcttggaaagaacacaggaaggatgttcctctagacgagttgtgtagatgcagtagccaatcatgcatttatcgagaagacattcagtgtgtagatgcagtagccaatcagtgtccaagcctgatagcaccagcagcagaaggagcaaggaagacatctcacgtaaagctgcatgcatggcccttagtcaaatgcgcaagaggttgcctcgaatcaaggcatttcattttcttcctctcgctcataacaaagccttaaacagattgttgcagacagattggcaagttagaataaagaacatttatcgagaagaagacaatcagtgtgtagatgcagtatccaatcatgcatattttatggtataagggttcttgatatttgatcaattacagctgatgttattggacctgcatctccacgtattattgctttgatgctcttcttttcggctttgatgcagtagccaatcatgcatagtttagtgtttgtacttgttaataaatgccaggagccatgcttgtgtcagtgcaaatatccatctggacagaaaactgaaggaagtgctccacttctttattctgtatggggagtgcttatcacttattagctctctgtcatttgttattttcctgcttggatcctatctctattgttagacaatgaaatgtgcggatttccttgtcaacatgcccacggtctaggggcatgagtctgttggaattgtagatgacattacatggaattaaatctcttaagtaggggatagggtggcttttgaatcttgaatcagttgtcaaagattcaatttctgcaaagatggctgctagaatctctgtccctttgatgaaatcttgaataagataaagttttttaacacacaagagcctttctatacagttaaatgcttgatgagaactttttttctaaattgaagtgcatgaataaaggatggaaaatttggcatggaaaattcattcaacacgaggttcaatttcaaataaatttggcatggaataagaagataatttttttttttttttttgtgaatcaaggtattttggccgaaagttaaggataatatgaggtattgaagagacaaagttacctatattatatcatgttaattaaacataaatatttaaattaaaataatacactgaagacataattattgaacttgacttaaatcgatcagattgactcgttggtccaagaattgaatattcaaccctgtctgagtcacttattagattgattgtatgtgactcagtgcgacctggtctcaaacctgtaacttgatcattcgattgactcgttcatgttttttttttattttttttttctagttgaacaatatcacttatattaaaaaatttaatttataacttgtagttgtgtatttatagatttgtttatattttttttactaagcacaattgcatcttgaaatttgactgataaacttattatcattttaaattttttttcttgatttatttgtgtgtatattaaattctaagactgtttatatatattaagttctaacaaatatgttcaaatatgttgtatgttgaaaattttaaataagtttataagtatgcttctaaatacaataattgatacacacaatattgtataaattttaaatttttaagtgtacaagttttcatattataaaattatttagatttttttaaagtataaaccgagttatggcacataattaatcaatgactcactgatttttaaaatatgtcccctgtatttttcacacactaccaaacacggggtaaatttttagatacgtagagtggagggaaggtaggtaggtgttgaacgaacgaaggacgccacaaacgcaaaggtttatcttcatccttcctttgccctaatttcttaatccttagttaggttcttcgttacaattcctttcgttcttttttctcgcagtaacagagctcctttcgacattgaagttgtccttcgaagcccttaaacttaaaccccatcatcacctcatcttttagaagcaatgtctttgtcaacactgagattaaggtctgctccctctctctctgtctctttgtttcggcattctcttctttgttattcccaaagtgcatgtacaagggcaagtgcaatgctccactctcaatctcattataacaatcacaatgatcacaatgatgctgttgccttattcaaccgcatgctccttatgcgccctcccccacccaccttccaatttaacaacattttgagttctcttgtcaagatgcaacgtttccccactgccatttctctttctaaacatttggatttcaaagggattacatccgaccttgttactctgaacatcctcatcaactgtttctgccatctgggtcagatcactctttccttttctgtattggccacgattctcaaacggggttatcacccagatgtaataaccctcaccacactcatcaaaggcctctgtcttcgtggggaggttaagaaagcactgaaatttcacgatgatgtcgttgccctagaattccagttagaccgaattagttatgggacattaatcaatggtttgtgtaaaataggagaaacaaaggctgccatacagttgatgaggaatctggaagaacgctccattaagcctgatgtggtaatgtacaatataataattgatagcttatgcaagaataaacttgtaggggaagcttgtaatttgtactctgaaatgaatgcgaaacaaatttatcctaatgttgtcacctacacgactctgatctatggcttttgcatcatgggttgtttgatagaagcggttgctttgttaaatgaaatgaaattgaaaaacatcaacccagatgtctatacctttagcatattgattgatgcattaggtaaggaaggaaagatgaaagcagctaaaatagtgttggctgtaatgatgaaagcatatgtaaaacctgatgttgtcacttacaacagtctagtggatggatacttcttggttaatgaagtgaaacatgcaaaatatgtattcaattctatggcccaaagcggagtgacacctggtgttcagagctatacgatcatgattgatgggttatgtaagacaaaaatggtagatgaagctattagtctctttgaagaaatgaaacacaaaaatgtgattcctaatacaataacttttaattctcttattgatggtctgtgtaaatcagggagaatagcttatgtttgggatctcgtcgataagatgcgtgatagaagtcaacttgcagatgtaatcacttacagttccttgatagatgctttgtgcaaaaactgtcatctagaccaagcaattgcattattcaagaaaatgattacgcaggaaattcagcccgacatgtacacatacacaatacttattgatggattatgcaagggtggaagacttaagattgcgcaagaggtttttcagcatctgttgattaaaggctatcatctagatatacggacatatactgtcatgatcagtgggttttgtaaagcaggcttgtttgatgaagcattggccctactgtcaaaaatggaagacaatggttgcatccctaatgctataacttttgacataattatttgtgctctatttgaaaaagatgagaatgataaggcagaaaaacttcttcgtgaaatgattgctagaggcttattgtaggagtaaaaccaggtgagattctttccaattaataaataattagttcattcataacaagtagtcaattgttcattttaatgatttatatagactttccaaactcactatcatctgcttgtatatacaaacctctaaatatgactcagcttctctaatctacctatggtctttgtttttgtcttttccattccaaattttactaattttcactgcatgtgagctttgggtgaaaacttgcagttagttagtttcttctcttattttactaggatattttcctatcattctctacgtctttaacacttagctcaacaaaaattgttgttgttttgcgaaggaccacttcaattttttcttttcacactctaccactgatagtatgaataaaatatatgccgcattgctttgacattatcttatagaactaccatgaaattcctcacaaggtatttgatttctctgtgttagaagtaacattttggggtaattaatttattattgtttatttcaggggatgatggggattctatggtgccgatgcgctaatgcaatttctgtggtagatgcagactggttaatcagcaaagatcaccagtgttttatttgttaataaatgtgatgctaggagactaacattgaggatttgatggttaaatttcacatatattcaataaccagtagatgttttcattttacaatcaaaatcattgtaacgagtttcactgaattttccactttgcccggaatttttctagtcaattatcattgatgcatcctgctgatttgtgcgttaaactaccagggtttgtgaaattgggggaagtggctatcattgaactgcttgttgttggagacatcttgtcaatatcaatattccgtcctgatggaatcttttggttttgctgcctctccattaaactcgggttctcttgccaccaataaggtaaaattttttaactcgagcttcctatgatgttaaatgttgcctaaagtgagcttatttctaaaatgaagtacagaaataagggtatatatttgcttgatgttcgatatacccttatttgtagccccaatttgggtgcattaatttgcttttacttatacaaactgtcattacaaaacaggctgggctgatacgggtggtaccatggaacactttgcagcattcagtgacttgtgcattcatagctgtcctatatagagactacaagctgacatctcaaactaaagctctatattgtagtaaaaatcagctgtataatccagtagatcttgtaaattatccacttcttaggtattcgtgttttaggaaatgggatcaacagttttccattcttatcatagggagtcagaacttttgtcaattactgaattgcagatttactgtttggaacaaagcttatttcgcagtattagtgtgcttattttatttgtacattatatatgcactacggtcaactattaagggccaattgttacatcagtgtttcaatttcaacttgaattttgatagaaatctaaagatatatatatgtttggcctttgtattttggtgattctcattatataggtggctttgccaaactttcagtttggccattctatcacctgtttataatctaactttccccctctgtatatattgcatttctctctctctatttggagctgacttccatacaccaacttaagaattgatgtttggattggagtaaaagtataatttgagaagcatatcacccttctctctcacacaagaaacatatcccagaccgattttactgtccaacatttggtaggacatacaaggttgggccagcagttgaagaagtgtgaaggaagggaagaaagaggtagcatgttcgaattctaccaaataacatttgttaataaaaataaaattgtccaacattctgtgccattagactcagccatggccatgcattgctctgctgctagacagcagtattggggcatgacaatgactgaggacaacagagcttatattttaaatatattaatattaaatatgagaattgcttttcaattaaaaaataacaattatatgattaaatttgttaagatactctgcaatatcttaaaattattaatataacaacatgcaaaagaatcatttttccttaccgttaaactaacgataaaattataatcttatactttcattttaaattacatattgttcaaataatataggcatttctacactactcactatttcaaataggcctaaaacacattaggccaaaacccatgctgatgaagattaaacctgtactgaagcagccccataaaatcatcatcagggaagaatacatggaatgacaaataacgtgacccaattatatttattttacaaattactatgtatttatttttcaagctacatatcagcttgcatataagctatttatgaaattatgaagcctcttgccctagcattttagaaaggatgaataaaaagacgggtgattatatttctggtttttataataaaccatagcagtgttgaagacagtcattgaattgatatcatcaaggtacaatacaatgaaaatttaccaattgaaatggaaactgcgagcatcagaacaccccagaacgggtgccagttgtggggataaagaaaaaagtatgaatattgttccaatcacctacaagaacaaagaaaacaggagaaggcaatgatacaaacaaacatgaggcatcaatctgtcatgtctcacacaaactatttaccatttcccctctgaaaaagcacatcggattctctcgcatttcgctttctcccaacctcgcaacagaggctttgctctgtaaaagctgacaccaaccaccccccttcacgccattcacgccactctcctctgtgttcccacattttcttctttctcatcccctaattgcaagtgcagcaatcaccaggatgttgttgtcttatttattggcattaccccatacacctgaccttcatactctgagcatcctcatcaattgtttctggcatctaaagctcacatcacttttgctttttctgaattggccaacattctcgagagggtttatcacccagatgcaataaccctcaccacactgcactttttcacgacgagggggtagctcaagggttccagctgaacaaatggattgtgtaaaacagcagtgtgcatataatctttctcttccttttttgtcaacaaggtcagcgcttcaccaagtaagtccgagtccattgatcataagagtgtatatctggacatttaaatggtaatcttatgccgagagaacttttcagcatcttttgattaaatgttaccatttgaatgtccagatacgtactcggatgcggacttacttggtaacttttgaaataattatttgtgttctctttggaaaatatgaaaatgatagagactccttcatgaaatgattgctagaggcttattgcaagggtaaagtaggtgagatgctttccaattattaatgaataaaactagttcattcataatcgtaactacaaatagtcaattgttcattttcctgatttatataaactttccaaacctactttcattttcttatgcatacaaacatgtgaagatgactcaacttcactattatacttaatggtatttctgtttcctttccatttttgattaatttgctttgcatgtgggcttttggtgaaaatctatagtcagtatagttttttctcggattttactaacacttagttcgacaacaatttttacagctttgtcagtgtccacttcaatttttttgtcagactctaccattgataggatttaaactgtacactgtatttgctttaatagtatcttgttgaactaccttcctcacatggtactttattttgtccatgctaggcgtaacagtctgggtttattaatttatttctgtttatttgaggggattgtgagattctaatgtgcagctagaggatgcataggattcacagcattggtggtgtggtttcaaagaaattaccataaacagggattagccctgacatctttacctttagcatcctcatgaaggtttgctgccaccttacttagatcaaacggtgtttgttctatgctgggtagtatttttaagaggggttatcatcctatccattaggatcaccacacttgtgacgaatctcttttttcgtgggaatgttgaagaagaattgtaagttcgtgatagtgggttagctcaaggatctcacatgatccaggtggaattgatcaggtggaatccttggatcatgtgatatccttgagctaatacactatcatgaaggcttctttaacatttccaggaagaaagaagcccttcatgagtgtggtgatggtaatggtgataaccccagaaaaaacagcattgatctgagaagggtgaccgtaagcatttacgaggatgagtgaagatatcagggctaatcccttgttgactgtaatggttgaaaaggggaatcacagtgggatagtgcttcatcttcacgtgagaactgagaagactgttaaagtggatgataggagggggagatcgcttaaaaagcatgcggttgaacaaggcaacaacatgatggttatcaaggtgattgtcagtttaagactgagaatgagaatgaagaaaacgtggaaacacagagagggagggaagaaacctgaagaaggaagacactgtgacgggccaggccggaaatggaaagagtgtggtgtgggctttatggcaaaaggtatgcagtaaacaaaaggagggtgtggtggggtttatcaacttgaaatgatgtgggtgatggaactatggaaaggtcagaacctgatacctgctttctttttgaaaagataatcaacttttataaatttgtgataaaaataacaataataaattctttaacaaaattatattactagagattgtaattagatattattattcaggtttaaataataacccgccatttgattcatgtttttaacattcagaaattattaaatattgattttcatacatgattatattgtgttagtttctagtgattattagtgacttctctattgctagtagtaccctgagtcatgcttcacgcttatgtgtaattgcctcttctcacttctaatcatctctcgcattttgccatgtattttgatagtaatagtgtcatggtcactaaaatacaggaggccgacacacctcatgcataaggacagctcaagaaaagtacaagcatccaggatattctcacagattttgttactaacaaattcacaaattctgttatttgcaattcgtgcatccattctttactcttcactattttctattaaaccataaatagttgccttttctggtacatgataattgggaagtaaaaattttaacttttcttggtgagtctcatttctgataaatcaagatgataggaatgctcagtaagaatctggtagacacttgctatgacttggccagctcttgcatttcctccaattatacacttaatcctttgtgaattgtgcatcaattctagattctgctgcaacaataatagtaaacctgacttggctcgacagcatgttcaatttcaaagaacttatatagccgttataaattgacaataacaagtttatttctatattgaattcttttgaacctgtaaattggtttgtatattaatccaaagatcacttttattgaaaattagcacataatcagaatttactcatactaatataagtcctaaattttgattggatacttcagtttttgcctttacattagtaatagactaatagtaaatagtaatatgtcattgtaatgtctagactctagaggcttttaacttgtctctgattagatgcttcttacaagctattttcccaaattacattgtactggcttgacattgtgattgttgcagagcttgacagggcataatatcagttggagagggttcagactttactggtgtcccaagaaaattctggcagtaaatgacacttcacacatgagcgcttcagacttggcatccatgtgcttcagacttgcaattgttgaggtaagaagttttttttttttttttttaaacttcctttcttctgttagacaacaattgattcaatcatgggccaaatcaactttgactctctgacaatggttgcctaataagatttgattatttctaaactggggcatgaactaacccttggatagaaatttgattttaattaacataaaacagtgacattgaaaataagcctaataacatctacatattcatgtcatgttttatcatgcaagtaactactcgtctatgtaacttcttgcagattgaaaaaatgctatcagccaagaagaagtcactatattgtaccagtgaacctggaaggtaaccaatcaggttttgctgtctgaggctggatcctccattatagtatcccaaactgttgaagttccacgcacattgaagtttgatatatagtttttaaatacatcttgtatttgcttttctggtaagagacatgggtaaaaagagttaaagtttaatttagtcatcaattcaattttaataaaaatagagttgtatgtaattgtaaagtaattttgtatgatttgattcgtttatggatagagtaatgtgtctcgggaaattaattcattagagctgttacgtgaaagtttatggtgatgaacaggggatttaacatcctctcccaaaacatccgtttctaatttctcatttttgtgttgaaagtttctctctaggccctaaatgagttttgctaaaagaatatgattaatggtgttttttgtttttctttcctagtgtcattgctggtttttgcctgatttttaaaactcataattttggttcctacattttgtaatccatcatcattctgaccaaaatgccggttagaaagatcattaaatattaatgatttttctagccgacatcttaatcatggaacacatgaattttgcttctcttgttagatagattatgaagtaattatttagtaatttcacaaagttagattgaaggaccaaagtttgggtattagaaaatttaagaatgaaaagtgaaggctttaaagttaggaaaaaaagaaccaaaagttggcaattttatatggacaaaaaaacattaacctacaaaaaaatgccgaacaactaaaaaacaaaaagctagaatattgataaaaattaattagatgaaaatagatgttggagggagtaaaatgatataaattactcataaatttaatatgaatattaaatcactatggttctgtttcaataaaactttccattagtatttatagaaaaaaaaaaacagaagataaaatgaattgaatctctaaattaaaataaacttctgaatatcaagttttaaagaaattagatgagagaccttgtcaaaattgatatgatttaatatgaatatataattgtgtaagatatgttttagatctttcaatttttgtcaaaattagttttaatgatgattttagttctcgtatttttttaatttgtggatttcatctttcatcttagtattttaagttccataaaaatgacaaaactctaacactattaaaatatgaagaccaaaatcattattttttaagtttaggggttaaaattacttttgataaaaaaaattgagaaacttaaaacacattttatcataaatttctttttgtatcatttaaaagttaatcattctaattgtaaatcataataatcaaaattctttaaatcaacacttctagaaccaagtgaaaaggaatttcatttttctttcataaggtaacaagttcaaaatattgcaaacgaaagtgtttagaaaaaaaaaaaatccccctttcaataagtttttatacaaaggatagttggctttcagaattgtggttgtgttggtctttttctaagggttgggtacccttgtacccattatcctctttacaatatatacatgcttattttgctgaagaaattctatttttggtgcgttaagtttgtttttgaatataaacaaattcatatcaatttttcttaaaatctcaaaaaatttctatctacataaaagtggtacattatttttccctctataatggattaccgtgataacactccattttttggggctatcaccttcctatgtcacgtccaacccacctagaccatttctttctactcaactttcagccaccctttttattgatccaacgaatccacaaaacaaacgctgttaaagtggcaaaaacattgaaggtagcccccaaaaaatcccaaatagtgcactgctcttattcaatgtgaatagaaaatgacccctttaacgccagccacctctatgtgccttgccttcaattgcatttaaattgtgtgccaaatttccattcattacctgttcttattatgactttgtcaaacttgcccccacagtgccactcacccaattccacttcatcaccacatgtccaacttagtctctcactccccatgccattgccatcaatgactgactttctcaatcaaatcactgttgcctccccccaagtttgggtttacttggtttagttgatttattggggttgagtttggttgtacacttgcctacatatcaacaatatctggaccaaggtctaataatggttaaggggctagtttgtctccatagtgacattatctgaaccagggtctaatggttaagggctagggctagttttccaacttgttggttcaagttatatgataaatccacaaatgccacctaaaatgtaaaataataataaactattaaaggattaaaaatatgtctttaagtctctcaaaatgggttttatccactttttatttttaaaatagtatggttttgtttcgattccttgtttaataaaatatgtctgtgaaagacaataatcatatttgacacgtttcaataaaagaaagataaaaaagaaataattttaaataattttgatggtcatacattacccatataaaaactttataattattattaaattaaaaattattgttagtatgacttttaagataattattataaaaaataattaatttatcatacataataatttataattaaattgtttaataaactattttatgctgtcgtaataacatgttttttcattttactataaaaatattttattattatatttatagtaactaggcacatttagcccatattaaaatttagcatgcatttttaaattcaataaaaaaaaatatcaacttcatccttatttttatccagttaaaatggtgggaatatttacatttccggttcatcaattttgatgtcaaaacgatagttattttattaactctattattatctctgtgatatgcatcatgctacaaattttatagattgtcgaatgtcgaatcaaagttcaaagcagaattaaatcaccattggagttgaatgttaacgcatttattattatgttctatgttttctgatttgctgccatctactttatctcaaaagtttagagtttatatctaaaagagtgataatatagtaccaaaacatggcattgcacacatcactcgcatgtcccaatttcttctctttttcctccttacaaccccacttatgccaatgccattgttggcatacccatttgtttggatcgagattctgtgtctctaatttctgttttcataccattaaattatagtgaaggctcctctttgtttggattgggtgggactcttctgcctgaaacattattaatcttatatatatgacctgttcaaagggccttacaatttgtatttactagaatcaacggtttttgaataaactttagaggatctttcttcttcattgttaccttacgattgagaacgatttcactaaataaattaccaatttttcttttcacgtgtatatatatgttaatccccatggaaggatttaacatgtgttgttttcaaaacaaaattgtcaatgcaaattagcataaatggttaagaacgactgtttgtttacgtgttcagccacgttaaacgtcaaaactctctcttacaaaaatcatgttcaacgtgtctcaaaatatataatttgtgtaaaataaacacaccctaagaaatcagataaaacttcttcacatatacatgtttaaatatcctaattaattgaagtcactcaacaagttgttttgttttgacgtccattccttccagataaacgttctagtgtctatagattttggataaaatcatttaccaagatggacataattaaaaagaatcttgtggtctatcagattagtctttaaacagtcaaatcatgttgtataattcatataacccacctcactgttatattatttacatatgtacaataattaatgctatagtttgaacctcaactgattttcccatcatgccacgatcgactacatgccccgtaaggttggaaatattgtacctaaaaaaatatgaaatgaaaagattttattttatttttctcgctcaacaatatggttaaagtggtaatcaatcttaactaagaagttgagttttaatttttgcccaaaatgtttttcaataaacacaatctcaaacgtagaaaataagagaaaactctgtaccaaaaagataaagaaaataagagaaaacttaagataggaaaagatgatttatcgctagtaattccttaattaatctaatattatgatcattatctggtgtaaccacttttgcacctaccggatcatcaagagagtagggttaacgtatcctatcaggtggaaacttaatgacttgccacggatcaaacactaactttcttgtatccaaagacaattcaacatctttcctttattttttctacacaacccaaaattcaaccaacctagaattacgccctcccttacatgctccacaaataatattattatgtaaataattattaattaaaccaccaattattttgcaggcgtttcacttttttaccgcatattactgactctttaatcagggatatatccacatcaggtgttcaaggaaaatcaaggaaaattacgtgctataataattacagtatactgcatctagctggaataagctgatttgtgaagattatcaattttatgtaatagaggttattagcattgatatagactttcttgtattagagagacttttgattttctttagtggcggggtatgtcccgtttattattgtatcattttaggtttaataatttacatttttttttaaaaaaaaaaacccaaagtccttttctggtcgaagtttcttcacatcactaatttgcagactaaaaagaattaattatgatgataatgaccattcgggttatggcaaagtggagctcaaatcaaatgctaaatgtcaaaagtgatgtcgttgaaggtagcatcacctagtatacaaacggtagaaggtattatttacacgtgaattatattatgttacattctataacaatatttttctttcatattaacgtttgactacgatatctggggtttgttagtattatcatttttttttaaaaagaggcacacatattcaaccattatgagagaatttatctgaataaattaaagaaggaaattaattaggagaagagagttctattttatatagccacatcgatatcatatcacaagcatgtagaaaaatcatgatcatttagcagaaattatataaaaatatatatttatcaattcaatcaaattaatcatcgtcagcatgacatgacgggggacggactctataatccccttctcacatgttttaagcaaaagattcgttttaatactaagcttaataaattcataaataaataaaagagcctccttttgaatatgtagttgtacaccttctctgtaaatataataaagtgttcaacttttgtcaatttgaaaatttttacattattaattaattagaaattcttttaaatatgactttcaaagaagatattcaaaaactcataattaaatgatagtgtaaaaatctttaaagggattgggtcaattagtataaaaaagattcaaatatattaaattgaatttaaatacagtatcaattatgtacaaaaagctaaaaagattagttatgttgcactcccgtcccggcccaatattcatacgtacgtagtagcatttaatgaattttataatattattattattaaatttatcaaatgagtgtcaataaaaatttggtgaaagtatatacagtacaataaaatcaaaattaaaaaaaaaataaaaatcatatcgatccataatgcaaaaatcattttcttttggcagatccctcgttctttctccctctgtagttgaatccaaactttcccccaacgaatacaccaaacattacttgaaaaaccaccacccttctttcacgtcctatatatgtcccacataagaaatactctatagtttttataccatggtacaaaaaatccctacataagaatcactctctatatatagtcccactttgtttcttcaaatacaaatacatctcatttcatttcttttctcacacaacatgtactcaacaaagagcatagctgattcagcatcatggtgttgtgccttggcactattgtgtctaatactattggggtccataagggagaaccatgtgccggaggaggatgaagccaccgcgagagggcggagcaacctctttgaaaggccgtgtgatgagatatatgtggtgggagaaggggagaccctacacaccataagtgacaagtgtggtgacccttttattgttgaacgcaaccctcatattcatgaccctgatgatgttttccctggccttgtcatcaaaatcacccccacacccacatacaccaatactaagaaattgttcaagaggtagagctcctagtttttgtttttttttcttcttcactttttcacttttttgttttcttgtgtatttcattatgtatatggttatggtacatatatatacccagggtatagttgtgaatcatacaagagaagaatatggagttttatttttctttttttcttttcaattttttagaagttgaaagtaatagtgataagcactttctgtttgattttcacaagagaaataaaatgaaaagaatatctcttatagtcatgatcatggtattctcttattgttcttcttcattaatatttgttatcggttctgtttttttattgtttggttgattgatgcatagtacgtgtttcggttttcggtaaggtaaggtctctctcttcccctctttctctttctttcgtgttccaattaaactggttttgatatgtcaccatatgaaaaaaagttaagttacgattattttttgccacgacatatcatttctggtattctttattatataaattattatgtctggtgatgtataggtgaaactattacaactgcttgatcaccatttttatatttttgtttttctaaaaatggacggttataaagctcaactatgtgtaaggactaaggaccaattacaattcttcttattacgtaatccatgtccagcactattttaacaccttaatttatatattgctggttaattaccaattaataagttttaaatttagaaaaaagacttatcctttcatgttgatattttctattggaaatatgttcttgccgtatagaagaataagcatttggaacgtttaattgcttcatctgaaaaaaaagggtaaaataagaagaaaaaggatttggatagaagacgataagaaaaaggaagaggcggcaataagaaggaacttgagtttgaatgaccatcatggatggctgtgactttttggttggagctcgtgtagtaatatacttttccgaatcttttgaatttgagaactacaaaagtaaaacagaaatataaaaaataataaagaggcaaatggataaaatataattttattcttgctgaaatattgacttaattatatattttatcatttaatcattattatttcgtcaatttcataacccaagattttaggtattttatttagaaatatttaaatccaaatcgattcgaaacaaaaataaaaaattgtccaaaaaaatcaaaatcgaaccaaatccattttttttgggatttgtttagataatttttttcaaatagatcgatttggttcagtttacgatttatatttttgaaattgaactcaatgcaacacttatattaacacttatattaacatttatgttatatgtatatcacttgaattttattgtgttttgtaattttatttatatgaaacttatataatgtatatcactttcttttttcgaataaatttttaaagataaatttggtttaaaatatgaaaaattgatagattttgattgtagaaggtttaatatattaataaatttaatagattgttattagtaattttttaatgtgaattaatttaaaagatgaaaagaaaatatataaattttgatgaaaatattttagtaaaaattatgaaaactaaaccgaattaaaccaaaagtattggtttagattgattcaaatcttattttaaatgaatatcgaatcaaattgaattacatatattttataagcttgatttaagtgatttttttattaaaaatttaaccaaaccaagggacaaatacctctcattttgtcatcatgtttattttaattttttattattttaccatcatgaaaacacttttcataagtaaaattagtgacaaaatgacttattttttggggacaagtcagtactttgttttgcattcaagtgataggtgaagtgcacaaaaaaattgaaaaatataataatgaaatgtgcaaaaaaataatctttgatggtttgcaaaatggtaatagttagatgataaaacgtatagtttaactttctataaaaaaaaattaatatgttatactctttatattttaataaaaaaaacgtgtttttaattcttataagacttttggtaaatataagaattaaaaatagattaaatttttataaagactaatactattattttaacgaatcaaaacattttcaccaaatattaaaaatactatatatctaatacggctcggttaatttgagcgacaaaatgaaagaaaacgaagtgtataatttcttgttagaatctctacggaaaaaagaagaaaacaaatatcaaagtgcaaccacttattcgaagcgtcacattaatctgattccgatcaatgttcgaacgttgcaaaagaaagacgtgggttaaccgttctcttcttcaacactttttcgtggaatctaaacttatagccccaggccccaagtttgatgctatttgaatatttgacgaggaatgcttgtcttttataaaaaaaaatgaaaataaaaagttttaatatgagaggataaaaatactttttaagtacgaaagaaaagaatgttaatttgtgttattttaaggatacaaattttctatgttggtaggtgataattgaatataaaattatttatattttttataataattagttttaaatatatatgcttataaattgaatatttttttttattttttaaatctcatttttaagaaaataatctaattgaaaatgaaagattgtgtgggtcaaatgtgtatcaaatactatatataacccagagttactaactcagtttaactttagtgtcagaccaaatatgtcattcatctgatagtggcccattgtcactagaatttagtaatttaccaacacagcttctgtggcccacttggccctcacaaatgctaagttaaaaaaaaaaaacgaattcagacgttgttgaatggatggccaatattgtcttgtatatttttttaatgttgttattagtatgaaataatatttattagtgttatttatgattaatttatgtcaaaaaaatttactaatctttttagtggaactttttttcttttaattatttttttcatttacaagattagaaatagtaaaaagatcgatttcaatacctttcaattcaataatttattaatgttttattgcatatgaaacaactaaggtgtgcccaatttttaaaaagaattactattgtatatttgtttctaattagacccatgattatgataagttttgaaattattaaaagaaatctatgatatcacaatggcatgcattagctcctatacattttttttaactatttactattgatgtgggccatctgtaacttgaaatgacttttatcttaattcaaagagcaaaactgaggcgaaaattgttgttattgaattaagatgaaaaactgcttaaatgatacaaatcaaagtatacataaataaattatgatagtcctgtcaaaaaaaaacttatgatactgattgcatgcatatataatataattagccatatgagacgaattaaaataattaataccacagaggataactaactacaatttaattatcatgttggattttagagattccacaaagacctaacttggaaaggaagatattgaatgaggaagaaattagaagtttagtcaaagcatcaacaattcttttttctttttttcttttcacagcagcatcaacaattcttattacgttctagggctgtcaatttatttgccttagcctacgaccaacatttgaacttagaggcttgagattaaaccctttcactaaacctgtgtgcattatgcatcaatgtctaatgtcttaagctgacttttttcatgtaatttatttggggccatttctcaattgatcttcaaattaaaccgtcaaaattagccatatatctttggtttatttacaatgatccgtttgcaagtatcataatcgttcagatttttggcaaaattattagagaaaggttttttgagcgacaaagctagttcttgatgataaatgtaaatcttgtcattgttttatttcaaattataattataaccagatatatattgatgtgtacattatgtacatgtgtgtcaaatcattaaaagatgagatgtcgggtaagggttcaattaatagctgaaatgaacatgattacaaaagaaatatagttgcgtgaactactggggaattcacgtgtattagtgtaccctaacatactaacatacgtatatttttttattatattatgtttatcaatattgtttttcaaaacctctcatatactgacacatgtatttttttattatttacaattctattccttttaaatctttaattatattgattactaatgataatttaaaacaaaaataagatttggcatatcttggacaccatcttttagggtaattataagaattcagttacaacaatatcgatctacatgtaactataagtgttaactgttatctaaaaaaaaactatacataaaatagatgcaagagatgaaaaccgccaaaaatttcaaattattagaattatatcagaattttaccgccaaatcaaactcactctatagtctatatatacctttcccacacaagtttcttgatcaagttccaaattaagggtaaagtgagtttgtagctgtaaacgattctgaattacatggcccttaaattacaattacaatccctttcctccaaaaaagacttcgacgtaaagacgcaaggtaattaattatcaatcaaacaacatatcattaaaaatgcatcgcttaatcctattctttggaatatctttaattcttgttgtttcttgatttcttttctgttttttcaacaatagcaaagtcaacaagaatcaagaaggcaaggatgcgtgggcttgaaccagtgtcatggttccttttaataatgttagcgttacgattgatacccaacatggaagagtgttcttctcccgctattgatgtagagaaacacactttggaagaaccatgtaaggaattctatgaggtcagacaaggggaaaccttgtacagcattgctgagaagtgtagggatccccatatatggttgtggaacccgcacgttgaagaccccgatgatgtttaccctggtgtcatcgtccgattaaaacctgttcgatgactaggaattgaaatttttctaggttttaatttaatgttatcattttattttcttattattaatttgttgactacttgtaattgctgggatttaattccaaatatagagattcaaccaatcagcctaatttcattttagcacacaattattgatcatttaaatttatactaaatgctttatatcattaatcacataaatgattgtctataccaaatgctttatatcattgatcattccctatatttggtatcaatgattttaaccgcacgttgaacacataaatgatgcatttaaatttataccaaatgctttatatcattgatcattcctcggtaatgtgctaatcttgttttgtttcctcaaaacattttacctaatgtgtgtatgttcttcaaacatcatatatgaatcaagcatgagtgactctggtaccaaatattgggatttaactttaaatatagggattcaagaatcactttgtgttctcatactcaaaatcatgatgaaaaattgtacgcagaaatgtatggattagccataatggaatgatgatgaaaggttaatcaaaaaattgtatgcagaagcgtttgcaccctgtttttcgttgctctctactaatgggaagaccataaccccttatattggtagctgtcatttgttaccccacatttgataattataatttggcccctcatcaaattataatatcattggtttctacacaattatcgacatatatgtcctcagtcatacttttatattaattagacccaaattattcaaatcagtttggccaatgactcatacccataaacacctatttataattttgtgtgaacagtaaaataacttcttaagatgcctttgacgcgagaaacattgaatgcggaagaatcactgttagaaaacacaggtttggttataagtgaaccgaacctctttaaaagaagcaattcggttcaaattataacttttttaaattagtgcaattcatttttttcaaattggttgagtgtaaactagtagtttggttcagacccaacctatttttttgcaccaccctacctttgagtagtagtcactaaagactttagcactcaatcaagtagtacacagagaattgagaggtgatcaaattggagagtgaaaattaaattaccttatactcttggctctatgttgagcttcagaactctcatggtggtgtgtctcttttacgtgtgcacgaaggatatcattattggatatttttgggtttcaattctttgctttggatgtgtgtgttgccttgatgcatcgtcaagctattagtcgattgggtcaatgcattgttgcggtttctaggcctcttgaatgttggtccagaacacaatccaatcgttttttattttcatatatatatatatatatatatattaattatatacaatgttaattatttttttgaagaggatataaaatgttaatattcactggtgtaaaatttcacacacacacacacacaaatattaaatatgttttgtttctttaaaatatttcaaaatgttaattttaataactaaaatacaaatgtgtttttacttctatatttaataaaagtgatgatgtggtttcagtcctcgttagggacaaaacacacgtttctattaaaatataaagactaaaaataattttttttcaagaaatataattgtgagtcaaatcaaaagaggtaaggcaaataagaattttccaaacgcacaaaagagttggaaagaaagggaccttagggcatgctgtgcctgtaggtgtgaccgaccttaggacattggttgtggtcactcaacaacttcaagtaatggagcatatcaggattctttcaaaagctattagctgacttttaaaattaggaagaatcttaagtttattggaaaaataattcaagactatgacatcttataggaacttcaagcatatgccaacattttaaaatataaataaaataaaagggaaagtaaacagattttagctggacgagtatatccaaagcataaccctcgagtagatgccaatgtgtctatggctacccttaaatgttgtgcctatatagtttgtagggggtgtcaatcactacttgacaatttaaagtagcaaaggtgtagacacagtttatagggagcaaggcaatgagtgagagcctgagagggacttgtgttcattagtaagtaagcaaatcattcatagggcatgtctcttttggcaggtaatggtgattactttggattaatttagagctaccaaaatatgtcttatatagtaatcaacttgccaaaggagagctgccctgtgagtgtttgatttacacatttgtctcctttgcctgcatgcaatgaatgatgccatgcaactatatattgaaaaaggtaatgtgtatgtgagctgaattcattcgaaaagaattaattcatagtttgatagaaatattttgttttttttaggacatctagaagttaaagacaaattacttaatcgatttttcaaagaattattttgtactgatgcaaaatactacattatattataaaataaagtgttttgcattaataaaatatttcgttcgaaagtcgatcaagtaatatttcttaaattatcttttgagcccacacttgatttgcatagaaaaatcattatagttatcaagatttcaatgacatggaaagaggagtgatagtaaaaaaactttcaaactcaggtacaatagtataagttaaactttattagaaattagaaaatcataatgtggaagttcattaaattaaaaagttactctaattgtaattttttaataaattttaattaataaaaatatatcttagaaagaatcttactaacttttctcgagttgcaaattattacttaaaatatcatgtgattatcatgctcttttgccattcattaattattcctagatttcaagaatcgttgatccatggaggacatttgcccctatactatataaagagaacttcccccatgtgttgaaggtacagaattcactctaattgtgcatcctttgttgagctttgccaaattacttgaatgtcaaaatgtttccataggtatatttcatgcccgatccgctttggcgtcattagctcagaaacatgaaagattgaagttaccccagagacctagctagggaagcgacctatgacgatgtttctagtcttctattttttttttttttatcagcattatttttagtcttctatgatgtactttctccattttatactaagtatatatcatgtaaggaaaaataatacatcttaaaataaatattattttaactttttaatataatattaattattttttctatcaatatttttattaagtatcagtttaacttttcaatatagtattaataataagtttaattttataaaattacaactttgcttaatttatttattagttttgtttaacctgtgtaaaaaaaagaataatacttaaaacagaaaaattatttctttttaattatttatattttaaaagataattaaaaaacacattatttttatttcatattttaaaaatccggacacggaataatgaaaataaagaaattcgcttttcgctatttcttatataaacctttaaaaattaggaaaaagtaaaataaattatattcgaatataattatttgttcatcaagcaaattaaacaaactcaaatatttttgttgactcatcaaaataagttgcaacacgtgtctgaacctagttcaactagattcactagtgttttacattgtaagaaaaaaaattggctcactaagactttgaattatatatgttgacacagatacatcacttaatcacgtgttaaggtatttcaacttaaaaatagtattaagttaattaaagacaagaataaatgttatgagggaggttgcctgtatatgagattctacaaatgacttaaagaaattaattaatattatttataccaataatatatatttattttttgatagtttattacataaaaaatttataattaacttacgtttaatttgaaataattataagatatataatcttatctaaaagattacctattctgataagtgggtgagagattttgatcaacaaaatacttgaatgaagtgtcatcttatgaaatatcatagaatatgagtcgttaaaaattaaccgttaaagatgttataatatttaaaccataattggtgatgttattatgtgtttataactctatattgttgtgaaaatttaataattttcttttatagatttttgcgttgttttttcatatatttttcgtgttcttagttttctttctgttttttccttcttccctcatattaattttggtgaggagaccccttcaatcttgatggtgggtcgaatataggtctttttttcttttcctgttgactagtcgtttttctttttgatgaaccgactcgtcgttaattaaagtgaacatagaaaatattacaagcatatctttttatgcatctatgaagcttctccgtgattttgcctcggtggcttttctctcaccaaatctcaagatcagaaaagggattccagagagaaggaaattaaagaacattgaataaatactcatcattaactgattcccctttgcaacgaagagaaaaaaggaagaataaagagactattgatgaaccaagaggaatcaactcatagcataactcaagcatatgctattttgcttcattgcctttttctaaatggttatgtttataaagcttgcaaacgcaacatgcaaattaaaatgtagttgttcaaagaaaagaagtttagtatatgcaaataagtcatggggaataacattaattgtgatttgaagcatcctggggagctataccaatgacttttataatatgataatctagtgacttgccaaaagagagtttccatatatgcagctactttaattagcttatatatatagtgtttgtagataccccatatatataatcgatgcaatcatacgaagttgcttatggaagggtgaaatataaatgaaggattaataaatgaaatacagaaatgagaagaacaacttttggtgataaaaaaaaaagtgacaagttgtactgcagtcagctctcttaaaactaaaaggtccttctctctaaaaattaccatacgggtagtacttaccaaagttttaaattacgattgtgatttcattatattctttaatattgcggataattacaatacatacaactaaaataactataattgcaatcgcgctgtggtcacaaagactacaaaaactttgatcttgcagcggaaattgtgtccactgaccttttttaaaaccttggtacctacacacaagcatttaggttatataacttttttctcataagttgtgattgaagcaacctatagattaatatagaagtaccaaatcaaaactaacagcaattgggttcccctaggaaagatgtagctctagattaatatatcatgtacagtgaaaacatggagtaaggcattctatgtatgtgttgaaatacgaggcaaaaagctagagatatatagaaatgagaaaaggcgattatacagaagcatgacttacgtactactagtaactaataatcactagaaattaatacagtacaaatgcaggtgtaactaatcaaccaatttaactaatagtgtcaacaaactcaagtaaatgttctaacattatggttggaaaaaaaattcttcatcgcaaatcttcacaattaaagtaaatcgatctcttattcggaaaatgtaagtgattatatagtatgtatttcatgataacttccatttgccacctaaatatacgtacgagaccggtatgaactccttccaaccttttcaggtaaaacattttaaatggtaacaaattttgtccatttactgtagtctgttatttgcaatggcaaaccttggcgcaatgataagattagccttgtaacttaaaggtttcacatataaatcctcaataaaatctcttcactgaagatggtatggaactttaattattattcttaatttcttttctttttcatgttcttatttatcgttagaagttcaaaacaacaatattaactattgttttttcaattatacccttaactctgtaattcttaaatatcttacacacttatcataaatgagagagatataatatttgaggttatgctgggaagtttaagtagttttagcttaagcaagagagttttgttaatatactctaacttttaatttaaaaaggagctttttaatagagtttaatgactattatatttgtataaaaactttttatattgtctaccgatatcattagtatatagttaatgtaattattatcctacataattatttgtagttacataaaaatgtaaaatattttacaataatattaattatagactattttctcattttaatattatacaacaaattttttggggtgtctaaatctataatttagatgcaaccactttaactcaaagggcatttaagtaaatcttgctatttaaaaataaaataaaaagaagctatcaatacttgctcttgcttttatgccacaatcactccccaacaaaagctctgttccgtgcaagaaataatgttaatacgtattcttttgccaaagtatgagttgtaaccatatattaattgatacttttgtctatttttataagtcatataagatgaagacactgactattaaaggttaattatcttataattgtccagatgcaagtcgtatatataaaatacatgcgaggagtcaaagctttatacaaatattgtaaatgaaaaagttcacgactatgagcacaaacaatctcacaattcttgattgtactactagttgtactgtttttgaacaaattgtaacacataaaaagaagaaaatttagtttaaagaaaaaaatgtattttttcattcctataattttttgtcaaacttgatttaatccacgcacttttaaattaataaaatcaatcattcaaccttggaaaatacgtgattaatgtttcttcaacatattattttgtcagtaacggaattagtagagaggcaaaagtcaggtttgatttgattgaaagtaaaaaaaaaaaaacacattttatcccagttgaaatcttatgtgttagtatttgttaaaaaatagtagaactagtaggacaattattaaattgaaagaattatgacaaatttcctcctccttaaattgtcccattcaatgtctacattcaatgtgccaagttttacagtgtcaatccagcttcattctcagtcatatttgtatcatatgatgtgaggcagcattgttgatatattattacaaaataatatagatgatgaattactcactaggatggtttaaaagacaaccaaccacgaatgataatgcaaaaaaagttggctaggcgagctgtactgcaaaatgagcctatggtcctggccacatcaactttgccaacaaaatcctgcaatgactaatgagtcataaaaatctataacagcggaaaatgtttgatatcaaaaggcacaatagagaaataaaagcccaaaaaaacttgctaaactaggagacatttaaagcaacactcataaagcaaaaaaaagttgaaagatatggtatgagtaatgaggactgagacccttgtgctaagagggccatgccactcagcaaaattgattataataaaagataccctgattttggtacaacttttctccacttctcttctttaaagtacggaagaatctgaaaatgttgggaaggaccaataaagctttgtgacctttaactattaggaatcaacaatgtatgagcatcaaaactgtacaattgtcagccaaagtaagacatcctttggtgaatggatatccttggcataaccctaagcatatgccaatgtttcagtggtttattccatcttctttgctataaagactgctatacacacacaaattagaggcaattcaagacacatgcaccaattcaaggtgaaaacttaagcaaatcagcaatagggcacctctctcctggcaggtatttttggagctaccaaaaatcaatgtcaataacttgccaaaggagagttgccctgtggctggtttagcttaatctcatagaatggtggcagaaaaaaggtaatcaaaggttaatggaaatgcaggtattattgtctttggttttagtctcatgcatcttaattagtttaagggaagttattctttctcattacatttctcttgtgtgagaatatcagttttccattaatgtgcataaggatttcagttcacaacctaagcagtaaaatgtaattctctaaaagttatgaaaaaataacaatttgatgtaagtagcaaagtagtttgttttttggaaacaaaatgcatagaggtatgtttgtctttgtatgtttatctttactatgttctactgcatgcatactttgtctggtgattatagcagaaccagaaaccaatccttttggtcttacccaatgcaatcactatctgtgcaaaacataagagtctagaaatatacattcaaattataattaacaattgatttagttgtttaaattacaattaccagacgccaatcatttaagtttttatttttcatcatttaataatttcaaatattaaaatacttttctttatataatttcatagtaaaattacaactactgataaagttgtggtttgaatactttttttatttgatatgaccgtaattagagctttaagattttcaatgatacttcaatatattttcataaattttgatgttttgaactattggtgtgtaatacttttgatcctgttgatagaacgtataaaagaaataaattattttaaaacgataaaagatgaattgaggcagagttggcttgattttaaactcaatgtgatatttctgaacccaaaattaaaaatagtaacgtgatactactttttataggaccgttgatttgaccatagtaagttagaataagttgagccgaatccgatatttattttaaaaacagtaaaatatcatcggattaaaaatttaaagataggtgattgaaattaaataggaaaaataggaaaatcatacccctattgatttaacgtattatttcctatttgatacctttaatttcatatttaaagttataaatgaatcgattcaatatattttttatataacatgagtgttatattaggtttgaatcagacttcgtttttcccttcctgcatcatgggctttgctataatccttcactcatgagttatgaactaattctttgctattctttttttatcagtgtcttgtcatactggaaactagatgaattgactatctaactctgttggaaaggcttaactatggagaaatgtttttggaatttggaggcaagtctcttctttttctttttttggggggaacatttttgttaacaaatgttttagataaaggcagatagcatattgcaaggctgaggaataatacaagcatggcaatgaaatgaatgaatcattttttttcaatttggtccttaaaaatgtatggtgttgtcacattagttctggaaagtaaaaataaaaaaaaaattcaaaacatgacagttaaagagactagggaaagcatgttgttacatcattaattataatgttgatatttgatcatagagattaaaacaaaaggaaaattatagaaattaaaattaaaataaaatctttaaaagattagaatataaaaaaaattcttttttcagggattaaaaagttatttaagtcaatttttattatttgtttgaaaagaaagatgaggatgtgagaattgtgtgtgcctacacccaagatttacaaaattataaagtttcacatgcacatgacatgaaatgtgtgtgggggaggatgggagaagagagttgcttttttagtttatttttaaaatttccttaaaaaaatatttatttagtatttcatttatatatactattaatatatataaaaaattaaacataaatatgttaaaatataattatgttttatttttagtacaccaaaaattttgtttgactttttgttcctgaattatctttttcttttatttttcatccttgtcattacaataaatcatcaagtataatagaagtgccatgtgtttgcacttatgccacattagcaattcacttgacatttaggccaatacttatgttatatcaactactcactcgatatgtcacattaacactaaatataactagaagaactaaaatagaaactagataatttaaaaggatcaaaataaaaattggatgcctttataggaaccaaaatatgtttagcctagtctatttatgttttacccctatatatttacctattaacggtttatgtaatagcaagaacaaaagacaaaagaaaaaacatttcaaggatcaaatgtcaagcaaattttttttttaacctaaatgcaagataccattatattttaggaataaaagcatatttaagataactttttatatataaatccaacgaaatttgttcattttaccacatcatccttttcattagtttgatgttacaataaagagactttttaattttacaataaaaatatatataaattaaactctttttcataacataaaatctaataacaaataattttacgtcaaaaaataatagagtaaaaaggtttaaattttttagttgaataagttttttttttaattagtgctttttattcattttttttctctcctttttgaagtatgtaaaaataattttttccacttcttttttcttttaattaatttatttacatctatacaaaataaacaacatataaaccagaggattcatgcacaactgattatgtatgctctttttggcctgtcgctcgatacccaattattctttgttgtatagcatgcaattttgcttgttttcgaataattgcatacactttaaggttagtcaaattcactatttcacactaataactcattagtgtgagtaatcttgaattttatttttttaaataagatttcatgaatgaaaaaaatatgattgaaaagaaatattttactaaaaattatcaatcagattttccagtaaaatttaatcaccagcaaaatttataaacactttgcttgcaaaaaaaatcactatcttactttggtttgctttgctttgaataagtgcccttcctcgtcataaatatgcctgagattatatttgtcttaatgaggccattatccttccccgtctgatcatccttcacaatgctatacattaagcattcaatcatgcaattctctatccaaaaaaattaataataagtcaacccttcacaatggtaggttaaattaatatgatgggtgattaagtttactcgatatatatttaacttcaaccaccagcacgtgcggatcaattagtagtctatgaaaaagggattgttaattaaagttttttatttcaattattccggctttgtctaatctaagtccccagttaaatactggaagatatttttttatcatccttattataacatcttgacgaatcatcaaagaaagagtgatttagatattatacaagtatgaaaatataccattaagaataatttaaaaaaattaattgattaattgatattatctatattaataagatgtatgtatttattggtagtccatcacttaagaattttatttcattattaaacatgtctggtttagaataattatgagatgaatgatcttctcaaaagtttcctaaaaaaaacacgtgagtgaggataaaacacgttgagaagtctcacgtgtttatttgtaaatgtcagtcattgattctcaaggagacaaaattgattcttgaggtttcagaaaaaattatttatcgaagattctaaccaacaaagatgttgagtgaaatagtactgtatgaaatatcgtggtatttagaaatcgataattagaaatattttacttatcctttttaggtagaaggaaattaagtctgtacacaaaacttgtagcttatgaaaaaaacatatattcaacttcaatagaagaaataaaaaaaaactttattcaataggacaatatacctcttctctttctctgaaattgaatttttcttagataacgcaacttaaataatgaccacttttgcgtccactgcactaacactcagaaaccatgatcaggtctcattcatcaacgccaccaaaaatctttctccgattagttcttatcaggaaatcaaaaaaccattgttatttgttaacaatctctttttcaagaacctgacttagttgccgatatgtctttgatcactaaaacatgacctcagttctaatattagtcacttaaaaagagggcctattttaaagcaataagtagtttgtattagaatacaatcttgtgtgtttggtctctgattgtatatgtatgaccgtcctattaaatatctttcttcaaccacacacaaatctcttatctcatcattgtctatgtcaaattcatgactttatattatcagggatgttcacttgtaataatttaataaaatggacatatcagactaatcaaaagaacaaaaacaattgagtattggaaggggaaggggcaacccaccaaagtacaacttagctcgcatacacttcaattacgtgcaacaagaaatatataatattttaaataacccttgtaagcaaaatttcaaaatcatatatacattaccatcattagaccaaattaaacggttcagattgattggccagtaagtattatcaggtcaactgggctaggcaaactaactatgcaagaccaagtccaaattgtattacaatgaccctttcgatagtttcaactttcaccatacattgccgtatcagccagctaaatccaaacacaaaaatatattataaacaaaaggagagagattccgttgttatctttttgtgcttttcctatatgccgaatggcacaaagcatcaaccaatccaataggcaatatataccaaacttgtcttagagtgcaacaaacaaggaggataagaaaaaacaatgcagacccttaatgaggcctcacaaacagactctcaatgttgttgcagctgcacaaccccatttttcaactcaccaacatcactacacaacacaacatcaaaaatcaggaacagttctgccgagtggcgccacagcttcgcggttacaacaacatcctctatattcccaaacactcaattcaccaaccatgagtctcttccatcacttcatgaatcattcaatgagttcaccaaagtgtaccctcagtattctgagactgaacaagttgaccatgttagagccaagcactatttccacctctcactctccaaccaaacttgccttgattacattggcattggcctcttctcctactctcaacttgaacaccatgaaacatcaaaaagccaagtaccctcatcttcaattcctcaaacaccccaattaccaccacctaattactcagatattccattctttagcttatcttgcaagactgggagtctaaagactttgttgcttcatggtgggcaagactcagaatttgaggctgcaatgaggaagagaatcatgtgtttccttaacatatctgaaaatgattacttcatggttttcacagccaacagaacctcagctttcaaacttgtggcagattcataccaattccaaactagtaggaggcttttgacagtttatgactacgagagtgaggcggtggaagcgatgattagttcctcaaagaagagaggagccagggccatttcagctgagttctcatggccaaggctgaggattcagactacaaagttgaggaagatgattgagcgtaagagaaagaagaagaagagaaagggtctatttgttttgccacttagttcaagagtgacaggagcaagatatccttatctttggatgagcatagcacaggagaatggatggcatgtattggttgatgcatgtgcattggggccaaaagacatggactgttttggcctctctctctttcaaccagactttcttatttgctctttctataaggtctttggggaaaacccttctggatttggatgccttttcatcaagaaatccgctatttccagcttggaatcttcctcttctgcaggaattgtcaaccttgtaccagaaaagcagcctcatcaattatcagatgattcttctggcactgacttagaaattaaaaacaaatcattaccaacatgcctacatgaagagaaaccatttcctttgtcatctttctcaggtccaatgcaaactaaacaatctgaaactgttgaagaaggagaaccacctgactcaaaactaaaagctcctcaatgttctgaaattgaggaggtacaacaagagccagttcagactcctaagacaagcaatgtccaagaaagtgacattcaatttaggtgcttagaccaagtggattctttaggattgattctcatcactaacaggtcaaggtacctgataaactggctggtgaactcaatgttgaagcttaagcatcccaacacacaaggggttcctttggtcaaggtttatggtccaaaggtgaaatttgatagagggcctgctttggcattcaatatatttgattggaaaggtgaaagggttgagcctgctcttgtccagaaacttgctgataggagcaacatatctatcagctatgcatttctgcatcatatttggtttgcagataagtatgcagaagagaaaggaagagtcctacataccaaagtggttggagaccaagaagtggtgacaacaaccaacaagaagaaagatagtgttggaatcagtgtggttactgctgcattaggcttcctggctaattttgaagatgtctataagctttgggcttttgttgcaaggttccttgatgctgactttgtggagaaggagaggtggaggtacattgctatcaatcagaaaacagtcgaagtttagtttattccattgagtttcatttattcttatggattgtaagtcatggaagaatccatgaagtgtgaattctgctgaaaatttaatgtaaatgcaaatatgattctcgaaagaaacaaggattacttaccctattcattcatttgtatgatggattcaaaaactatggaattcattatgtcaaatatactttgttgcctgtgttgtattcttctggtatgtccataactctatagctgacattgaagggtaataaagttacaacaataaaattgaatgtaaaatcaaattaaaggggagaaaatatatccgcttaccctctaacccctctaagaagtaagaagtgctcaagaaaaaaagaaaaagaaaaaaatgtgttttacgtctctcagattttgatcgatattgattatcatttcaacactttgaaaataacaattttggtcttgtattttttttataattggtaaatttcatctctttttatggaacataagatattaggataagagaccaaattcactaattataaaaaataaacgactaaacgtatcgtaatttttcaagtataggaattaaaattaattttgaccaaagattaagagagttaaaatacatttcacccaaacaaaattaacattcacatttctgttaatgagaaaagtacggcctcctccctctgggttagttttatatttcggtttttggttagttcctaaaaagtttgcatatttcaccattttttacattcgagtcaatttgattaaattagctttgaaaaaacataaattgtgagggtgaagttcatttcctagcattgttatccacgtttttttcaatcccttattccctgctctcatttttcttataagacttaataggagcctctctttataataataataataaaaatattaaaaaaaaaataaaggcacattttcgcgagaagcctcttgccattttggctggcagtggcatattattgcaaattgcccgtcataagatataagctctccctgtacaaattagggtgttattcgtggggttttgtttgatttaaaaataaatccaaatcaaattaactttttattgtttggtttgatatatttttttttattttctaatctgttatcataatgtaaattaaaaattattaactaaacttacataattttcatgttatattattttaaaaataatttttgtttttattaaattttatctaacatattttagctgaaaattattattctttacttctatttatcattttaaaatagtattatgatatctttttgtaatataataataaactgtgcatctctcgatatttattctttttaatatatgaaagtaaaatatacaccttaattataaagcaaatgaaatattataaattatttaatatctattattaattactgtaacaaaaatcacaaattaaaatttattataaaaaaagtacaatataactcgtctattataatcattaaaaaatttaaaataatactaattacataagactaaatatctattaaacaaatttattataattataatgtgtaatttgattcaatttttataacaagaataaaaaatcgaaccaaatcatgaaaaagtatgggatttttgagaattttggtttgtgccattttcaatttatttatttttttaattttttatatcagcttagcgatttaaaaatcgattagttcggtttttaacaaccctaatacaaatgtgataatatctttctaactatgttttcttgatacttacacaagggcagcattaacaatacacttttcaacgggctttctgatattgatcttaacttagataaggccaattaattctatttacactttcttttttctctttgcatccccttccgttttttttttcaaaatttctttttttaaaatattatttaaaatgttttttttagaataagttgatgtgccatatacattttagttttcaaaatgtatttaatacattctgaaattaattcgttcctcttctagtaataaaaatttctagagaaacaacttcaaaatcatttgtgacccgtccattctggaaatatcagttctccctactcttagatttgagaggctatttttacttggctagctgacaattattcgaattttggatgtcgtgttaacttgagtttattttttttaactatcaaatctttaaaataatgataagtgtactcacttataggtcaaggtctctcatgaaacattaaaatgagtataatatttagtgataactgataagtcagttttgaatagctcaacctaaagttaagagagcacaatttcatacttactagcatgtggttcgtaccatgctcgagcatatgtttaactacaaagtaatatatatatatatatatatatatatatatatattagaaaatgtcttgaaaataattctcataaatttctacttaccatcatttggtctgtgccatgcatgcccccttcgatctgccttttaagattggtcatatgctggtaagtgagatcttaaagacagaaagaaagtgggagttgatttggaaacgtgacattcctcctatgattaaacatttcatgtggagagctaaggtcatcatcaatgtcattctatttttgagattttaatcacttttttttggttagatgttaaattttgtaaattttttattttaatattaaatctcttgagatgttaaaccatttttttaagattctacaagaaactcacctccaaatatttattttaaaataattaattatatatttttaattttaaaaaaataattcaaaaatacaaaaatttattaataattaaaaaaaaaactatttcatttttactgggttctgttgttcgaaaccattctaccagcaacagcagggaacccagtcgtcttgcagcaacaacagcgttacctcaaatttggactccagcagttcaagaattcatgaagtacaattttgatgcagctatttttaatgaacaaaattattatggcattggaatctgtctttgcaatgagcatgaatggtagttttataagagcacaaacagctttaattattaaatggtattcccctccatgcagaagctgaagcctttgcattttagttaagagacaagttaatcttcttgctcatttgtgattttgattgtattccctccgtgattttccttctactattcttaatcaaatgaaatgaaatgatctacttctcataaaataataaaaatatgttagttgctaaaaaataaacttatatctaaacaaaatgtaaatttgattcttattatccatgtaagaatttgttaatgataatatgtgagtatctttataaaaaaaattaagccttaaaatttatcttgagtgtaataagtaataaggacttataattcaactcacttaaacttattcatataaaaaatgcatataattagtcaataactattatgagatccaatttaataccaaaatttattagaagaactaattataacactgaagtttgcccttttaggatattcctttcatttagtttattttaattttaatttttcattcaaacgttttaaatatgatgtctttcttatttaatttctctaaatgtagaactgaataaaaaattcatatatttaaaagactaaatatgaatcttgtgatatttagcgagattaaaacaacttatattaatgtaccaaaaaaaaatttatattattagataaaatagaaaatgaaaattacaaaaaaaaaacattttaaaaaagaagaaaacttactaatccaattgttgttcgtacatggattgagcaagtcaacaactataaactgatctaataaataacatttattagaagaatgagcactagtaataaaatatgaatactagtcaactaagcaaggtttgaatttagatttgataataaatattattaaataaaagtcaaaaaagataaagaaaaaaagtgatgaatgtacgtgatatttaaatgcaaagaaagaaagagaaatatatgataagaaaaatctcatatttcttgatttttaaaattaaacaacttaaaaaaatactattcaaagtaatgagtttttataaaaaaaaaattgttttttagaacatctgcaacaaatatttttttattattgataaaaggaataattatttatagtttatacattcgccaaatgatttttcttttagattacatgtatttttttttgaaaattaattttatttgatttagataaaattactatataaatgataaaattttatctttaaatatttaacacagttcaaaattcaaaagtcaaactaaaatcctatagttaaaccggtaacaatctgttagcagtctactagcaagtcatcaaccataaaccatacaaatttattaacatttatttagaaaaagaaagaatgataaacattatatttaattaagaaaaaaataattaattatatttgattacaccaattctaattaaatattaattttttaacttatttttcattaaaatttgatataagaaattactgaaattaaaactttaattaaattaataatattttaaaaatattaacatgagataaaatttattaaaattttcttacatttaaaaacaagaaaaaaaatatattttttttttctagttgtatttgagacaagagagaatatatcattaatttgtttttcacctacaaaaatgacacccaccatttcattattgcttgaacaagattgatacacattctattcaaacagacgcccattaaaatttccgccaaaaaaggagggttagttaggaagacacacacacaccacaactcttcctaaacctaacacacacacacttacactttgcattccaaattccacaactttcactttctacaacactatttaccccattttctctaaatccaaacaggccccaaaagaaagagagggaaaattctcttccatggcctcttcacgccctgccaatgtgggaatccttgccatggacatctacttccctcccacctgcgtcacccaggtctcaatttgtggtttttctcataaagctctgatttttatactttcttttttgttatgttttgtgttttgttttgtaaagctgcgatttttattcttggtttggttatgttgtgttttttgttttgatgggttgtgcaggatgctttggagggtcatgatggggtgagcaaagggaaatatactattgggcttggacaggattgcatggccttctgctctgaggttgaagatgttatctcaatgaggttgattacaattttgcataagcaataagcatttccttactattgtttttatttatttattattatttagtagtttgcttattggtacctttggtttggaatttttgcagttttgatctcccaagtttttttttaaaactaattaaggtctatttatataattaagcaaattattcctatgttgattttcttccacttaaaaccatcaaattattattttttagccaaatgttcagggatttaagatgatctgggatatgaagtaatttcaaaagtttagaagaaaatgatttagtggaaatttgaaggattataggatgtgagataagggtttaaaaaggtggaaatttgattttctttattttttaaaaaaaaaattgggtggaatttgataatttagttggtgagttttcagcaaagaaggtttaaaactataatgatgttttactatgtaatgttgtgtgtcttagatgaccacatgccgtctttatttataatggagaaatcagaatcaatattgattacatatcaatcaacttctgattattaagtaattacatatcaatcagaatcataagtttctacgtaataataaatacaagataatgtaaagataaatgtaatctagcaaaaacaatgtaattgattcaatttgtgaaaattttgagtaggtaatttgaatttgggggcagggggttcaggtaggagaaaattgatagagggaccaaatttgctcaattttaaaaataggtgaatcacatgtgaattataaagagtagagagtgttcaaaagtgtgttattagtattccttaaatagaaaatgtagtttctctgttcttgagatactgtttcctaggagattttttctggtaattctaatatgtctgtttttgggggagggggtacttaagtcatgcttttgtacttgattaatgtagctagtcagtgttttggacttgtataatactataatacacatctttcctgcacttattcttataatattttgcttttaaactttgaatttacagcttgacggtagttacttcacttcttgaaaaatttaatgttgatccaaagcaaattggacatttggcggttgggagtgaaactgttattgacaaaagcaaatcaattaagaccttcctgatgcaagtttttgaggtaagttattctctgtttagatattgagtgttgaccctcaccttataagattattggattctatagattttcacagtcacaatatcttcccatatctagacacctcttctgggatattctagattctggagtgtgattggatataatcccttcttttgtgtccatacaaaattgatgctgccaaaggaacacaaaatgacaaatgagatggtttttttattttttatattggactattaaattgctatgtaatttatttatttttgaatgagtcaaaattagaaaggaataaaaggaaataagtaaaggaatctgtatttgtgcttatgtgatgtctgcatcttatattaactcatccaacaatcaggcaagtggtaatactgacattgaaggtgttgattcaactaatgcatgctatggaggaacggctgctttgttcaactgtgtgaattgggtggagagtagctcatgggatggacgttatggacttgttgtttgtacagacactgcggtatgtctgctacagatttactacttaatgcataaggaaatttcaattcttatatttttatccattttttgtcttattagtgacacaattgtatgttttagagcctctgaccaactctagcgtcttattatatatagatgtaaaatttatgtaattatcaaatttcacataattcaacttgaaataatatgtggcagggtggctgcatgtgtttccatgtagtaagcttctatctccagatgctgtgcaaaagaacttaaaattgcataaattcctagttaaagagaatgtgtagtcatggcatccctagcttcactgtcttaggttgtgttgcccatgaatttaccatgtcacaactctgcaactgatatttctgtatacaacagtagaagttcaagatatctccatcacatgaaaatattgtcaggagattgattagttgagtgcaagaaagttttttcatccaaattgatcttcttagtggcaatataatatatttttctcttgaattatgaaggatagaaatacactttcacgaagcaacaaagtatgaactgcattatctatactgagctatctaatgtgcaagtttgtaattgaatttcatgcatggttagtttaccaagatattacttttacaagaaagcttggaacacattttttttttttaatgtctacatgtctcatcatttgttctacttgactactattatacttatgttcctttctcttaaaacgttgaaatcaattgtagattatagtgtcaaacagttttcttagctatgtctttcttgtttcaggtatatgctgaaggacctgctcgtcccactggaggagctgctgcaattgccatgcttgtagggccagatgctcctattgcttttgaaagcaaactcagaggcagtcacatgtctcatgcatatgatttttacaagccaaaccttgctagcgaatatccagtaatgctctgtcacctcctcattattaattttacttgcatcataactgtactatgaagtgttgtcttagtttatgattgaagttcttttgttcttacaataagacaaacttatctatgatgaagatatttccaaacttcagttttacctttttttacccattgtctttggttctattttttatttgaaatattgacaaataaaatcaaggaggattgtaattgaaaaaaggatgtactaaagttattttttaaaaaaaactttatgaacaaaataataatgtctattgctagtcttactttgacaggggaagtcttgtacactagcccactctttatattggttagcaggatcctttttcccacccacttgtccccaacactaccaaattataaaattcatatacacaatcatcaatttttacagagcagctaaagctaacgaacactgattttttgtttttttaaaatggctataaagattgtcacttgattaaattttgttcaagtaatttatctcagtttgcaaacataaatatttaagcatgtttagattttaatctctgctttataccaattcttactattatgctttagtgattgtggatgccttctgtcaatcaactaaaagttcagcacacattaatttagacagatcttctctttatttttaattggtcattttcctgctgtagattgttgatggaaaactctcacagacctgttatctcatggcacttgattcctgttaccggctttactgtgagaagtaagtatagactgaaccaaaatggccattttcaatttttcttttttgcttcaaattctcattaaatgttcttccatatacagatttgaaaaattggaggggaggcctttttcaatgtcagattctgattattttgtgtttcattctccatataacaaggtaattgtcatgcaggaattttttctccatatttggaatgaaaacaaaaaggcagagaagtatgtcataacacgacctacaatgactctctacataattgctttcttgatgtattgcagcttgtgcagaaaagttttggccgactatacttcaatgacttcttgagaaatgccaggtttgtgtatcttctgcttcatccacatgctttaatcaatgcattttcaattcaaggagccaagctatagaatgccattgacccttttactggataactattagttgaccttttggatatatgttgtttgtaataagccagtaggagccttgcacttgagatttcaattgcatatacttgttagctgtttttcacaaaaaccactagtgcttactagaaaaagagaaaagacagttgaaccgcgaagttgtcttttgccaatgcaacatttagattagatcatattctgtaaattgtttttggattaagcactaacaactcccaggaaactggaatatatgaaccataaaagtacgtggccatttttaaattaatgtatttgaatcctaacttttttgttctctgaatttgttattctgtgccagttttgttgatgaagttgccagggaaacccttgcaccatatgcatccttatctggtgatgagagttatcaaagtcgtgatcttgaaaaggtagctactcttgccatgtttgaattgtgttttattgactaaaatgattgctagaaattgaactttcaaatggtttgtgcttttgtggtcattgtgattctataggcaaaccagcaagctgcaaaacatctatatgatgcaaaggtgcagcccagcacactaatcccaaagcaagttggtaacatgtacactgcatctctttatgcagcatttgcatctcttcttcacaataagaacagttcgttggtaaggttttccacacttgtattcttcgtttattttccctttgtccatgactgcatctttcatacggagaatggctgattctaaatttctcatcaggattgtctttctatatgcaggtaggtaaacgggtagttatgttttcatatggaagtggtttaacagctacaatgttctccttccagcttcaagagggtcaacatccgtttaacttgtcaaacattgtaacagtgatgaatgtttcggacaagttgaagcagagagttgaggtatgcagtctttaaccacttattagtgaatgctaatctaattacaaatgtagtttaaaaggaaactgcagtttaaaagaaaaatcttcatgaattcgtcttatttagatatgtcaataaatttagataatacatgaacacaaaattacaaatgtgtcaagttcaaatattttctggtgaatagattttaatatgaaaaatgcttaaaattgtatttggagcctatcatttgtaggatttgtgtgtttaaagttgttgtacttgagaccttgtgcatctcagtaccaaaaattgacatgggaaccgatgcattttggcctcaagttttggatcaaactaatccattgacccaaatagttcatgggagaaaattgagttatttgggccctggaggattgatggagcgaactgctagttttcagggttggctctggtggatccctaattcgacttcttctacatatgagtcatgttttcatcgaaagaagtttcccattatggtagaacaaaaagcccttaatctcatcccttttgttcctttgagaaagctcatccccagcttcaacatctcttggtcaacacaattttaaaaaaagaatagtttattcctcagtatctcatatgggttccttacttttaggaattgctagagttatgctagagcagacttttgtaataattaatttacaagtcatctaagataatttctaattagttgacattgtaaaatctttacactgacaatgtattaaaattaaacttgaatttgcagattcctcctgaaaagttcgttgaaacattgaagatcatggaacaccgttatgggggtaaggactttgtgacaagcaaggactgtagctacttaactccaggcaccttctatctcaccaatgttgattccatgtacaggagattttatgccaagaaggactaggttattggttagttgatgatcgctgatatattcaaatatggagttaaaatgtattttcttatggttcacctgtatttgatcccataaggttgtgtatcaaaatgtttataagatgtttcatttttttgtggtgatcaggttgtaaccaaaataagaataagtttatttgcgaattggcaattgtttttaaatgcactaataatccaaatatattagtagtttcttcttgagtgcaaaaaaagtataatgaccatgttttttctttttttttttgaagaagtataatgaccatgttaagaattactagtatttttttaccatatattttttagtgttcatggacaaaactggataaagacacaagcttttaaagacagacacggcacccggattgtttgttgccaattatgttcaaattgtgtaattttaatatcaaccattatggtttttattttatgctgtatggtacatttataacatggttaataaaatacatacttcttttttacttaataaaacacatacttaatcagtgagaaatatcaccattacaagattttataccataggattgtgatccaatacttattttctgagtcattaaaagtcatggtcacctagcttagcgcatgttgaggttaaagaaaaacacttttaataaatcaacttaacccatgtcaactagcacactaggtggtccaattccttggctcccaaggacaaaaggatgagaacatattgtagtgacaaaaagaaaataaagaacatatttataaacacacatgttaagaaatacgatagaataaattattgacagagccatgtgtatcaaaaaagaaaaacagccctgtgtaactgtgtaagatgcatggagtaaagtaacagtaattttttataacttagaagtaaaaaaaggtaaaagatataattttttaaaattttttgttataagaccttgttgtttaacttattcatagttttaccataatgcatctcaagtttatgattttattttaacaaatgagatgaataaatcatagataataatatatagatagtcaaaataaaaatatttataggttacatgtgcttaccatagaaacttatataattatatattttaaccttaactaactaactatatatatatatataaaagatcaaaatttaccctcacaataaaatatattgactaattaaaacttccaatactatttgagcataataaatgaatgaatgggcattcctttcttagtttagttattcttattaattaccctatcattagataaaaggaaccttcctacggaaactaggaaaattgattgcgaagatcgaacatactggactcatctctcatcaccaacttcacaaccacttacctaaactaacctgaaaggtataaggcaacagaaaaataccgtagaacatattatacgtgtacctaaataatgtacttttgttttgtggagtacaccccaacgagagcagaaacccatatatattttttaaagttttttcttaattgatgtaacttaattattaacttaatttgaattgatatcattgattttgatacatgcaacttgaaatttattaattaaaatagagtgaatatataaaagccatgagtattaacaatagttctgtaatggtactttttaaatgtttttattttaaaagtatgagcatcaacaaggacttaatatatatattattatgttttttatgtttagtttaataatatcatgaatttaatatacaaccaaggattaatctattcttttgtcaaagtaaagtcgtatttgtagcgcagacgagttagaaataaaataaaataaaattctttaatgactttatcacaagtcgtagaaaataaaataaaacaaaattataattttgtttcctctataattttaaatgtgatgttggtcttcctaattctcaatcaatacatttattttccatattttttaaaataaacaatcataatgtttttgttaattaattattcaaaattatatgttaactttgatgtaagacataaaatttaagtagatagttaatatgatgtttataggaattaaataaaaagagtcttcttaagaattggactcataattttttatttaaagataaagtaataaatcactaaaatacttattttatttaattaattttataaacattattttacatgtattattagtcaagagttatttattttttttgaattataaaattttataaattataataaaatatctaatatttaatattatgagtttttatttttattattaaactttaatttaatataaattaacatgttactatatataaaaatttgttttcattttattataattttttaaataaaaatacacaaactaatgtataaatcattttaaatttttttatgtatttcatacatattgcgtaaattcaatataatatttaaataatctaaaaaattaaaaatttattacttattataataaaaatttgtattgtttatatttaaaaataaatttacttaatttttataatttacataaaataatttacatattaattgatgcaactatattgatttatataattataggaaaaataatttgtatattaaaattaatttaaaaaataatttatataaataatttatatattaatttatgaaatttaattataaattggtaaaattaaaataaaaatatgtaaactattccaaataaaaatatgtaaaatgatatatagtaaaattgaaaaaagttgtatatttaatatttttaatttgtaaattttataatttgaaaaaaataataactcttaaatagtgatacatataaaatagtgtttaataattatacaaaataattatttttattagtttattaccttatctttgaataaaaaaattgtgagttctactcctattaaaaaaaaattaaatttttttactttgtttaatcatttattagataaatatcatgtcaataatttacatatgtgttatattaacaccaatatattacatcaaaatcaatttggatggttaattgatgaaaggacacaaattacttaatcttaaaaataaaagctaaatgttttaatttaaaaatagaaaaaccaaattcattaaatttaaaattaaaatgataggagataaaaattataatttagcttagaataaaagtctcagctcttattgatgactttacaaataacttaatatgtatgtcaagtcgcttgacacgacttgattagtgcatgatgtccgtaaatttatgacaagaaagtattaaagaaaatatgatagtcgtaaaattgggattgaaacttgtgattttttacattttgaattattttaaaattaaatttaaagctccaccaaattgtcttagaatataattaaatcaaattagttttttttttaaaaaaacattcttagatgtgcatgcaatgcacctaattaatactaattcttaataataaacatgttaatttttttatcatcatgatattgatacaaaatatttataattaatttatataaaaaaatttgactaatcatttttagtaaaatttttccttcaatcgcatatttcttggagacctaacttaaagagaccaattttacttgtaccgacaacttttgatacacatgaaattttatcttgatatttacaaaatcctatccttgattatagttatgaactgctttattgaatgttatacgtacatttccctgtgcctactggtctacgggtgcgtcttcataacaaaaattgctttgttgaatacccaagatttgtgttttaattgtgtgtaggtggatgatgaatatacttgatcttaaagcagaacaaaagtgaagtcaaaatttggcacttccagactaatctccaaacatggagtggctttcaagcacaataatcatgcgttaaacttgtattttaatttgttagtgtcaacaactttctattctatatatacagcatacacgtgctcatagttttcatcaaattctcatcactttccaagttattgtattccataattatctgtttcacttctaacaaaatggctcttctgccatattcaaaatgcagctttcttttttcagtcattttcctcttcttgacattatcatcaatgtctgaagcagagcttgatgctcactactatgataaaacatgtccccaagctgagaagatcatttcagacgcggttcacagagcttccacatttgatccaaaagttccagctaggatcttaaggatgttcttccatgactgtttcattagggtaagaaaatactaccatcatttcatatctatcgatgtttaaagttaatatacataaattaaggagtatttgatggttgtgtaacacataatatatttggactaaaatacccctattttgactatgtttatttactgtttcaaaaacagttttttgttttctaaaatttgtttaagcacatttgacagtgtgtcctttgaacatatctttattttctaaaagtttgttatttgaacacttgaacaaagcatttgaagaaaaagaagagaataagaaaacatcttctagttatttatgtttttttatttatttttaaaacacttattttataaacaattttcaaaacttcatagattttggatgaaaaattaattgttgaatagtgtgaaatcgtttttaaaatcagtttttaaaacaaaacaaaaaggagaagaaatatacccttactatttcatttacttgtgataaattactattaagcaactgttgaaaaggagtatataaaaaaaaaagactaggttgtaaaatatcaataattttgaaaaagaacaaggacatggaatggaacctgattaatgttttattgattcatgtgaaagtattgaaatggatgtatttgtaagttttggtcaattgtgaatgatagggatgtgatgcatcaatattgctggactcaacacccaaaaacctggcagagaaagatggccctcctaatctctctgttcatgcattctatgttattgatgaagccaaggccaagcttgagaaagcttgcccacacactgtttcctgtgctgatataatagccattgcggctagggatgtggtagcattggtaataactcaattaagccttcaagctattttagaactgttaaattcttgcatggcacttataggaggcaattgttattctagtaccgtgtcttgatgctctgtatggtaaatatttataagggggatcataaaatttcctattagagcaatattaatatttttacactcctcaatcttcacattattactatacccatccttttatgataaaaaaggatgaaaggagtaaaggataattatgttttcacactcttttcagttacatttcatcttagccattcatcatttaattaactgtttctattttcaagataaaattatttaatcaatggtgattaagtgtaaggaaaaggtgtaaggaatacttgtaataacagatttcatcttattagtaactctagagtgggttttattcatagacaaacacactaagtctctcacgctcttgcaaaggcgtttaggttttatactgatccacaaaattttgatgtccctccacattgtattgatgatatgagatcttccagtaaaaaataaaagtgtaaggaaaaggtctacaagaaactagtgtgattctaatgtaactatgggtgtgagcgaaacatttttgtttcaattataagaatccaaactcttaaattttttttttatgttctatatattaccatcaattgattcccaggaatcttaaatttaaactgtagtttatattgtttctatttcaaattattatattttccgtctttcttttttcaaaattttccattgctttataaaatataatttttaaccttacattttttcttcatattttcactaattgagattagataaaaccttaattttagattaataattctgaatatttatattttaatcaaatgaagtttatttttatgattgattagactatttattatttaatagtctcattagtcacattataatcaatcaccattttaagactaattaatgcagagtatgattacccaagataaaggtagtattatagtagtattacatattgatttctaaagttgaacaatcattcttctatgcatcaactctgtcaaagaaagttaaagggggatataacttgttttatgttgtaatgatcattgaacaatctattaattgctcataaattttcccagtctggaggaccatactggaatgtgctaaaaggaaggaaagatggaagagtctcaaaggcatcagaaacagtcaacctaccagctccaaccttaaatgtgaaccaactcattcagagctttgcaaagagaggtttaggtgtcaaagacatggtgactctctcaggtggccacactcttggattttcacactgttcttctttccaagctagaattcaaaacttcagtttgttgcatgacattgaccctagtttgaacactgagtttgcactagacctaaaaaagaagtgtccaaaaccaaacacaaacttcagtgctggacaatttctggactcaacagcatcagtgtttgacaatgattactatagacaattgttggtgggaaagggttnnnnnnnnnnnnnnnnnnnnnnnnnnnnnnnnnnnnnnnnnnnnnnnnnnnnnnnnnnnnnnnnnnnnnnnnnnnnnnnnnnnnnnnnnnnnnnnnnnnnnnnnnnnnnnnnnnnnnnnnnnnnnnnnnnnnnnnnnnnnnnnnnnnnnnnnnnnnnnnnnnnnnnnnnnnnnnnnnnnnnnnnnnnnnnnnnnnnnnnnnnnnnnnnnnnnnnnnnnnnnnnnnnnnnnnnnnnnnnnnnnnnnnnnnnnnnnnnnnnnnnnnnnnnnnnnnnnnnnnnnnnnnnnnnnnnnnnnnnnnnnnnnnnnnnnnnnnnnnnnnnnnnnnnnnnnnnnnnnnnnnnnnnnnnnnnnnnnnnnnnnnnnnnnnnnnnnnnntcatgttgaaacttggatatgtgggggtgtctgaaaatggggaagtgagactcaattgcaaggttgttaattgagaatgagaggggagagagaaagagagagatcggtgaatttagcaccgatttttttgcttctttcctttcacctttggtgtttggataacaattgtctaatatgatgtgttgttactgcttgtgtttaaataagagaaatgttcacttctacatttatttctgcacttatcagttgccacttgccacctagtgagaatgagacatagggtgtgaagaaattaagactactttaaaagtttattaatggttgaagaaataataaagttgaaataagtttccatcttacattaattaaccagcatttaggagagtttacaagaaagatttttgtttgcactaaatataacccccaatcaaaataagttgatattaagacttagagtatatttaattcgcagctaaaaatactgttgcaaaaatttcaagacatttttaacgcataaggaaattgttccttttggaacgtccgtatgagccaccacaatgataaagtaaacataggtttagttatctatcaacaatatttataagttccttttaatcttattttcattaccatatacattaattactaataatgataatacatgaatgatacttttatgcttgttaataaacacataataatcaagccattattcaaaacgaacagaatcatccactgcgtcctcatcaagacatgacgagcccaatcagccaccactttgtttatgctattgctttctgcacttcccaagttgctactgtatttttttggaaatattatttttacctttcaaattgatcattctggaagccaaaaaaaaaaaagtgcattttggatcgaccattcgggaaggcaaaagagagtgcaggaagcaactggtaagtgcaggaagcaatagtcatttttttttcgtgaaagtatccaatgcttccctctcaatggaaggccttggttgttcctttattcattatttagctattaacctattttgttatcttttgttttgttgacattgttgagaggtcacaggtgcatgaggtcttggacaaaattagttgggcctaatgtatggcgagcatgttgtgacccaacaacatttaaatctgattggggctcttacatagaatcaaagtactaccataagtgtgtaagggataataccttgatgagactgtgaaattgggggtaatggattctgaaaacagttttgacgttggatttcactaattgtttgggtctttgggcggtttggtatggtgccggtaacattaaacaggaggatgtgaatatcatgcttgattcatagctttagaattgctaatttgtttagttttgtggtgtgattttaatcatctaagtttcaattgggtcaattggatcctcggatattacaaatgtgtgattttaatcttttaagtttcaatcaaatattataattgtacaatgttagttcttttattagttagaatctgttgaactagcattgacttaatgacttattaacttgtgtgatatttgcatgatgatgtcatgttgatatggtggctgaattggtatccttatttgctatcaaagctcaagcaatcagacgctccttcaaactgaaccgatgccaagcctataaaaataaataaacaattaaaatattctaaacatatatacaatcatgcaaacattatctattatctaaaatagttctaataaaattaagacatgattaaaatctagagctgaaaggttgtaattaattcaatttatttccagattgcttgggagctttaacatttggcgtgtacaattttttgtattaaaagaattggtatcaataaagcaacccgcttcaatcttgatacaaattttattttctaacttccctacacacattctctctcaaaattgaaaacttgaagctaaataaatttattggtctattatttgtatgtattcgatcgcattcagatttctgagccattcaacattcattatgtgtcccttgacttgaaatgcctttagagagagcaatttttctgagcatggttcttttgttcaacaagagaataattttttggccaaacattgatagtggaatttacaccacgtgggacacgaatcgtttgtttccacgatatggttatccattccactcagttataaaacagctatttctagattcaataaattatttcttaagaaagttcattccttccttgcttctccgatccatttcttttccagcctttttccctcaggacaaacaaaatcatttgatgggtacgaaatggtaagttttattgcaaggcatatgtgtaagtgcctctccattaaccaactacataccatgtcttccctatattcatcactaaccaaaatggtgtaggtaaacccatacctgagaaactgcctaatttatttgtctttttatcaaataaagtttccaaagtcatgaattattgggctagaagagaacaattaagaagctaactgggcaaagttaatggacagctacccaattggaccctggcacagaagcaatcatcaaccttttaagatttgtcttcaagcaactttgatgtagaattaaacaactaatttgcgacaatttgcctggccaaaaaacaacaataatttcaaaaccctctcaatcggtcccttcaacttctactaactatgtagttcaatatattttattacaagtaaatgttgcttgtacggacaataatgacaatgtaaaaatcttaatgctattatgatttaattataaattattatgtaataggtataataaatttattaatttttataataattattttataagtcataattactataatttttattggttgaccgtataaattgttgtacactcacaaaaattaaactcatttattattactgttaaacgtagtagtatataataaagttttgctcagaaataacttggacatatgcaatgaaaatgggtttattagtaagtgactttaatttccttttccctttattacacggccccacttgtctgtctcttgcaacgattattgttttaggtaacttgcatgaatagggaatgggagcctctgccaagtgttcattttctttcccatactcaataatggttgcttttaaggctgtaaaattcaaagcaagaccctttatatataccaagacaataccatcaggcatatacacgctctatcaaaatcttggtgccatataaatgtaatgtgtcccgtgttgcttcccatggcttaccccattaggaccctacccaacttttaattaaagcaattcatagccataacagacgctcctctttcctctacctttccatgcctttgtcatgttgttatttgtactcatttggaaggctagttagcactttcagctagaggtatcaattttcctatggtcatgacctaatggctagatatcttttgtccattttgggtttagccaaagtaataatacttaacaagccagaaaagccttatctattttgggtttagccaaaataactaattcggattgacttgaatgttaactgaaagaatcaataatgcctatttttttaagtattaatatctatttttgagactggtatatgttaataaatatattttcatacatatgattttgagaatgaaactcctgattatgtatttaaagcatgcagtgttctaagaacattaattaaaaaatttaaactaaaaatatttttattagaagataaaaaaatttattatttatgagttttttacactttcttatgatttatataataaatattttcttcttttaattttttaatcaatatcttaatatactaattaacaatatcctttcaagaataagattactggtcaactattacattatgttacaaaaatgaatttataaagaattgagaatagaacaagaaaaatatatctacatgctacctgatctgaaatcatatggtagccactcacaaatagtgattccaatacagtatgagtattttttttttttagatttttctagccccccacgaagtaggaccacttcaaaatttgaagcattactctctctctctctctcagttcaagatagatataacatagaatatgaaccagtctgtaagagggtcaggaataatgtaaggggaatctgccaagttttgcgcaaaaactgaatcttgttctaaagatatatgacctcatgtgcttattcaaaataaataaaataaaacattatactatatcatgtattaaatgtatagtaaaatctacaatgcaaatgtgtataacggatatataagatgttcctttcaaaatacaaacaacattttttttaatgagacatgcattaattaaaattagctcgctgcattattatgttttcatctctgtcacgtgccctcttcgatggtttgaaatttgtagaagctagttataagatatatagtatcgtaaggcacgtacagagaacactaaacttttatcattataaaactttgctgcattatattactcaattgttgttcccatatcttgtatatatgtgagcatgcatttgagatagatatatacttgccctccaatgacattgagtatgttgttttcaaaaaaatgaaaaacgttaaaatacagcataattgcatggatttgagcgttgtgtttatgaaagttcataaggtttctaaacaaaaactacatattacatctatcctatatataatttgatttggaagctagagattgagaaattaaataatgagtttcttaatttgcagctccataattatgcacccagatatataaattgggaccacttttacacaacctttcactttcgaaaacgacacctcatttaattacccagccatgtgagatgtgtgggaaactagagtcgtatcaaaggtagagaatggaaacattttgaaaccaagaccttgttgtggtccctttaataacatgattattaccattgctatggcaatcataaaatgtaataattttgcttaccctgacaagaagtgggtaaatttcccactagtttcacctgtcggagaaactgagcacactttactgataattgctgtcacaaacttaattggtccgtcttcattttttgttttcaactagacttaatttaaacgcaataattattacgagatcaattatgtttgtctacacattgggttaatttggatgtgaaagcaactgaatgatttgaatacttgttgaactgatgaagttcattcaagtattgatgaatatacataatataactagctagtaactattttgataattttattttcaacattctaagtattatttgaaaattttcacttacgtaccattataaaaaattaaccaaaaaatttaaatgttaatttttctacgttgataaatatattaattgtttgcgcataaatttttaatatttacacaaattttacaattaatacttttttgttaatacaatgattctttttactcttactgtagtcggtattagtgtatgttaacataatgattttatatagtaaataaaagatgtaagaaagacagtaccaaaaaatttattactcatatgtttgtctatcatggagaaagggttaaatcacctgaggggaggaaggaaatcaggtggttattttctgacatgattgccgtgtccaaattaataataagtcaaatcttgaacaatgttgtgcagcaaatattttgtcatcctattaatttggtgcttcataattttcatctgtccggttgttgatttgttgacaaaaagcttggatgaacatttaatttccttcatttgctatatactcaattttagcatgtacttcacctaatgctttatttgacaaaataattaagtggacggtagaaaaacaatattttttattgcctagtgcaccgtaaagaataaatcacaggatgaatgattaattattaagcatttgaaatcaatttataagatacaaaagacaagataataattaaaaatttagcatgaaagatatgggtatacgaatcagatgaaaaaaaaggcgtgtatggtgccattttttttacaacaatcagaaaaatataaaagaaaatttaatgaaaatcaccttttgctcgtttgtggccaaactgattaataatatttagcacttcaaatataaaataatttttttctcatacaaaaaatcttatatataaatgaagatttaattgacttcaataaaataaataaagattccatacattaaaagtaccttcttacaatattcaatcattgattgtttaatcagcagttatagaaaagagtactgcaaaaaagagagtgcagataaatgttcatgaattttcattaaaatattgcaaacaattgctttaaacttagaagcttttactagaaagagtattgctagctacacactgaaaatttaatagaacttaaacatccttttatcagtaaccaatcctacgcaactactcgttgcacgtgaaaatggctctttaagttaactaaccagcgaaatcacatacttttattgtttaattttagaaagaaaacgaagaaaaaaaacactaaaccctaaattatcatctactagtaaattcaaaattattttgcaagttaaaatggtattagagttagtacaagttattaagacctaaataagccaagttacaacatcacctttctaattttattgtaatcaacgtatttttcaaatattatcgtgagactaacttcgttgtactactgtgactatttaattaaatctttgaacgattatctttaaaacaagtttaaatattattcttacttattgactccatgataacaaaggcaaatgaattcaattcaattaatattggtagatgcactttgcagtctctttcttaccgccggaacaagtttctttcgaattaccaacaacattcaaatcgaaggtattcaagaaaagtcaatagaaacctatttgcaggtcttacatatatttatgattgatttgaaagggatttgaacaagtgtatacagtcacaagtgggatcgcatgcattcatcacaagttcacaacacaactagggactattatctttttcttcgcagtgtagaaaagtataaacaattcacttttatcacgaaagtataaacaattcattggaagttatagataaattaataatttttttataggatagtgttcggctgatgtttttattgacttccacattcgtgttagtttataattaaaatttgtatattttcaaactccattacgtatacacgaacgaatttagcttgcattaaaattattcaaactatatgtggtcatttagatcagaacaagcttctacttaggtttcattcaaatattcgaacatttctaattttataaaaataaaaatatatttcagcctatattattttatgtaaatacttacacaaatcatgaaaacctgcaagaaaataaggaacacgcctccactgctagttgtttagttttcttgtcctacgtactcttactctccacgcttagtgaggagttcataactaccaataggtggcacaattttgataattgttttaagttccaaggactactagcgatggaattaggcaacgttgaacaatgatattaattgttgaatcttgtcaaacattagttaagaacactaattaaaaaatcaaaaaaatatttattatataaattataaaagaacataaaaaatatgatgaaagtataatttccagtctcttaataaaaatatttttattttaaatttcttaaccaacacccttatatcactagttaacatttgtctaaattgtttcaatgcctagtaatagacttatagtgttggacaatgacttgtctcttccaacccataaatacacagttaatgtcatttttttgggacccatgcgtatccttgcattgctttcaccaaatctttatattttcttagtttttgtgttagtgtgacagagagttggggttgtgagttcttagagattttcaatggacttgtgctatatggtgaatgaatatgaagctccaattaatgaattgaagtgttttcatggctttttctcttcctcaatcttattctaaattgttattttttatttatgtctattttaatggctgaatctctattctaaactttttgtgaattacttaattcggtttcgattacatgctttgtgcttcaattttacttccttttgcttaatgttattggtatgatggaaattaactaattaaacctagcttagggttaacttgaaaataaatcttaatatgaattaggatttgagacacatgatttgcattggtcctaagaatggaggtgtgttggttgtgtatactctttaataatcttgaacttactgcgaaggtgataagtgcgaaagcgttatgattcttgtttagccatctagctagggcatgttgtcaaagaattggaatgataatcttgagtgtaatccaacaatgaatgggtgtgtatgtttgaaatttaatcaggttagaaaggatacgaattaagaataattaaggagtcatgacttacatttgtttgtggatggttgtgtctttgtgtttttagtcttttgtatcaatatggtgagttctgactccaattaactaggttgattttaatttttctatcattcgataactgtgacaacttaacattctatttgatccaccaatgtcaaaaattagtgtatgatactcaatcacttttattacttttgatcatacacttatcaagttagtttttgtataatcattttgagtacttttttcattctcatcaaatcatctattacaccttcacaacaaacattttgtacaatcaatctaacacaataaaaccttaatcaacattctctatattcaccttaaaccgtagtctataatagaaaaatgtagtgacaaaagatatctctttattttattttattttacttttaaattaaatattataagaatcataaataaataaaaaattgacaaaataaaataagtatttaagcctaaaagtgtcatctgctcgatgttccgttgatggtaaaatataagtatatactccaacaagtagaacaaacctcttttaagttaattaaaagacctgaaagaacttatagtatatctttccatattctgatgatgatacaaataaacaaattaaagagaagttatatcttttcgtttacaacaagaatattgcacattgtggtatatcatgttattaaaagacaggacacgatccaaattcaattcatgtcccagaaaaaagttgtagttatgttgcagatatgtatccaatacattagagagttgtaggaatcacactgtggtacaagtcacctggatgatatttgcttctgcgtggtcttatcgtcatctctctccattcttagttacttaaccatttcagttcccaataaaacagcaggcttggttctgatcttggtctggtatttgctaagagcttggaagtgagtgctgtaaagataaaaaaggcaggtacacaaagaaaaactgtctatttctccaaatttaaaaacaaaaatggaaacaaaaataaataaataaaaaaagaaaaagaagaagaatgaagcgtttacaaaaatgaaaatttatgatttcatactttacctacactctattttgtggaggtgaaatagggtgaagaggaaagatatttatctcttttctgtttttcttatattaaacacttttgtatttattttattttacattatttccattcacctttcttatttttattcgctgtatttctcacatatttttttctttttctgcacgaatgtaaccttaatgtaatgttgtatatatatgtatatgaaaaagaaagagttaaaaaagatagtgaaagaaaataaaattgctggtgtgatgaaaaagactaagaagatatgaagggatataacataaatgtaaaaaatgagtgtgaaaaaatttaaaagatatgaaaaaataagtttaacttcttattgcacacacgtaactcaacatttaatgtgttatttttttcttaaaaaaatatctatatctttgatcgaagtaattttttttaatatacttttttttcaaaaaaagatgacctcacttttccaatgtttattatattatttactgtatcttttcaaacaataagaacacatattttaatatacatttttattttgttcccgaattaaaaaaaataatagtaatttattagaaagatagtgttctcagctcagtgtacttaattccttaccctgtgaccgttttatgcttcaaggatccgcttttctcgcttcttcccttgcagatcctacaaagttttttcctaccctctctctctctctctctctctctcggaggccactgcttattgtgtcattttcattctgatttcaccacttatttgacaaccctttttccatttcatttttcttgtttttaaagttgagcaaaaggcataggcttaccaattatgggcaaggagtggtattttgctggaagatcatctaagagaggtgtaggaggaggtgctgaggctgaaacacaagccccttctggttgcatgtgtgctgtttttcagttctttgatttccatccttttcactttcccaacataaaccaacaacaccaacaagatcaacaagcctcttttaagccaccctcatgcacctcagaagaccacaccacagtctcaaaaggtattattattattattattcggatataaattagttattactagtcctctttcaaaccaccaactacttttttttttcttcctttttctcatatggttttgtgtaattcaggtgctgaagcacctaggaacagcttagaggcagaggatggtgatggtacagtttcatctctctcatcaaaagaagatgattttaaaattcctgtaagttcacattagcctgccaaggcttgcttttccaccagttttgtttttttttagtttcattagtttattagtttattttgtaaagtgagtaaagataacactattgtgattattttgaaaacccagaagaatattatacaaattaagacaagtggagccacaagaacaagtggtggaaatttgaatgacttgtcctcagaactcaccagctctccagggacaaagacaccaactttagtggcaaggttaatgggtttggatcttcttccaggtgcaaactcaccctctttttcttcttcatgtctttcaactccaaacacacaagacaatgtgccacatcttcaccaccacctgaggcacaagcaacatgtccaaaccaagcacaggaacagcgtagatagtagtgacatttcagccacaagatctttgcctgagacaccaagaatctcctcagcaagaagatcagatgttgatcatcaccacagactctcactccaaatcataaaggaaaacatgaaccttggtgaggatttggagctccctaggctctcattttccaaaaggaagagtgatgagaacaatggcaggagtccaagccactatgccaggcaaattgtcaaacaggctaaggaaagtgtgagcagaaaagttgggcaagacatcaccaacacaactctcaaagcaagagaagaaaatgcaggccaattcagaagcaaaaagtctcccaaaacatcatcactgaaagcaattgatgaaactgaaaccagcccaaataaacactcaaaccaatcttcctactccccaaggcttagattcattgacaaacacaaaccaagcacaacaacaacatcaacagcaccatcaccactcaccccaaaagatcaaaacatgctgaaactaccaccacctccttctccagttaacactcaccaacctcagcttccaagagttttaacaaaaccaaagcttcaagcagtggtgccagaacagaaagagtttcatcagaacaacaaatctgttccaaaatgcaaaaaggctaccaatgaaaaaaagttcaactcaaggctcatcaaaaggcctccacagacatcagacatcatcagaaacaagcaagaagaaccattcatcattcgtcccacatcgcctactagagccagtgacatcaaaaacaccaaaagcaagaaaaatcatccattgtcaagcaatctcctcaacaacatcagcaatgtaccaaatcttctacctgtcaagacagacccttctccttcggcaaccaaaattccttccaaacaggtacgagctcattgttgaattttcaattatatgtttagcttttggtcatgaaaaaatatttgtattttgaaaagtcagttttaaatttttattatgtgtgtttaagtttttgaaaagaaatatgaaaaaaataatcagatttcttattattttgtaaagttgttttgaatattttctgaaaattcaaatttttatacttatttcataaaattattttgagtatctttttaaaaaatataattaccttttaatgtaaaaaaaatactccttataatctttttgttacataattactctttataaatgaaaccaaacgaaaaataacttctattttgcataatataaatttctcttttaaaatttaaacaaacagaatccaccaagtttgaatctcattgctgctgattgttaaacttttcccatttagtagtctatttttttcgtctatatttttaacttttttattcaggttatttaaaaatatttattgctagattttaatttttaaacattatcagtttaaaagtaatatttgtaccgtaaagtatcaaccaatgaattaacatatgatttttaaagtaataataatttttgtaagaaaattattatttgtttatctattaatttttttattcatgaaaataaaaatagtgtcaaaaaatttaccataaattaaatattatatttaactaattcaatccgacctcctcggccattacctacaaataatgtgtaattttattttatttttttgaatgactatcatatttaagttacattcttatctttttatatttgcaatgactgaaatgattaaaaaaaagtatattaacagtcacaggtctgtgatagtcgtcatcaagagtccaaaagcagttcacagttatctagttgtgcgcgccagaggtacaaacaagaagaaacaacaaccacactactcgctacccgagataacaacggtgccttcttctcctcctccaccgtcacccaccctcccaccccacaagagcttcagtacatcacagcaatccttgcacgtaccactgccctaaactcacagggtacccccactacagtttccttaaaccagcccctcgacccatcaatcttccaccacctcgaacaccccgccggcgacaaagatcgcaactttgccccgaaagaccaactgggtcaccgttggaatcggagattactgttcgatttggttgacgaggttctgagggagattctggagtctcaagagggagagagagaaaagaggctttggtttttgaagggtggtatttgtaaccaaagagggaggagcgttgaagggttggtgaagagggtgtggaagagggttgaggagttcccacgtgccaagtgtgaggtgttggaggacattgatgagttgattgacctgcagagagagaaagatggtgagagaatggaagaagaaggggaagaactggttgcagagattgaagggaacatatgggacacgttagtccatgaaacggttatagttatggattgttgggaaaatgctaaaaaagaaaaattattactatatgatgattccaaaatatcatcacatgtttgcagtctcagtcaattttaacatgatgcataattgagtttttgatttatgaaaaaaaaataataagaaaaatcaattatgtgttaaaattaattgtgattatgaatgtgggactgtgggggtgattttgaattactattgctatacaataatttcttgtgggaagtggggtctatgtttgtgcttgaactaaggacggcgtcgtttagtaagggagggtgtcacgtgacattgttgtgaggggtcggtggggaccacgtgcatggggtttgaagttaatttgaacccttcgattgtagggtcacacgaagaatttgacctctcgacaagactgttcttctattcattggtcattaaaagacaaaatttgacagagaaatccgcgccccagttaccccttctctctcacttctattcaattcaagtgaagtacatatttagtatattatttttctttgaatttgtattggtgtttaattgtgtttgtaatgagttagagttagagttagagttagagttagcaacttggatagtttcacaaagagttttttattctagattcccaccaaaataaatttgggaagattgttgagagaatatttaattagagaaattgatggttataaattagagaatatttattttgatatattaagttttaaatttttattctgattttttatgtttttaaaatgtattattttagtttttcttttttaattttccattagatactttagtgttttgttaatttttaaagtttaaaaaagtttaatgtcacttttagtccattatatttcacgattatttcattttgttataatatttttaaaaattctattatgattctttatcctttgaaaatatatcattttggtcttctttttttaaatttttttgttagaaaccttaatgtctgttttggtccaatgaaacacatttttgccctttctttgcattggttgtcttcatgtgtgacttgattgtagacgtcggatgaaaaattctttacttatccgacccaaccatgcacgatagtgatagtcttgctcacaaaactcacaaagagtcactttgtgactttcctattcaaatatgagttaattgataagttaaggtcatctttttatctttcatccaagacaactcttgctctaatattttcagcttttgttttcaatagtataattgtgtgaaaggttatgattttctaatgagcagtacaagaattttcgatggttccagcgagcttatgtgttgacttcattcaatttatgtggtgctacattttttacctttttagatctagaaaaggttggagatgatgattttttagttatttgttttttaaaataaaataaagataatgttttctattgtcctataagtttattttttaattttaattccctaagttaatgttttttcaggtcactatcagatttttttgtccatttttatttcctaaaaatttgtgttttttcaattttagtttttttaagattttaatttttttcatttatagttctcataagtttgtatttataggaaccaaacttggaaaaacctaaacctaaagggactaaaaatgaacaaaatatcttataaggatcaaaatttaaaaaaaaaatgcaaacttgctatgactaaattttttaaaaaaagaacttagagagaccaaaaataaaaaacattaacttacaaagacaaaaaatatatttaaaccataataatatataaaactaatttatatttataattaattatttgtgttggtccttatattagtcttggaatgtgtggtattgcatgttagacgacaactcaaacatgcgttaagttacgacagcttatttatttttaaaatttctttttcatcgtctattcatattcaatagtgacgaaaattgataagtaaaaaatatatgataagaatcaacaaataagttgttgatttatgtggtattaaacttatttctcttaagtaaatgttcagatttacattttatagatgagaaaaaacataattggaaggagaactccatgcatcaaagataactaatgaattttttttataattgatgatatttcatgctaattacatagtaaaaaaaagataagaatcaaacataattataattaattacaataatcattaaatgtaggtaaaaatagaaaacatatatcacatcttattttaaaaaaaaaacaaatgtttaagttgaaaaaagagttttacgtacaagagtaatttttttaaaataatctgactcatcacttttaattgagtcttgtgttacagcaaatgttttttttaaggttcgagtctaagtccattttcacttataatgttataaaatctgagctttttttctgcttttctttctttaagccatcatattaattaaacaatattttgtaggtgtcttaaaataggtagacgtcgagtttttttttttattgaagccatatttgctgaaataattattcatagtataaaaagtatagttttttgtttacataaaattttatgggaagagaacttatttcaaagtcaggacatataaaataacccaaaaaacttttaatatgtaggacttgcgtactaagaatatataggtaaaagtcaaaatcaaaaaagtttttggttggcacaatttttttttcaatgtagtgttcgatgttatctaatttaccgaaacctcgttgattacaagtgttctgtatacacacacgagaacacacaggacataaatgcttacatcgctttttgaacacaaaggataggatagaaagtagagaatatatcatatttggcttttacctcatggaagtttgagattgtaaggtacgtagatcaaccctacaactaaagttttctcttttaattttataaggtgattattttgcatggagacgcgaactttaatgctactttttctttttcttttttcacaacaatgtgttggaaatgaaacccgagacaacgacttttttcaccttttttttatctccttatttttaaactaactcacgaaaaaaaaatcacatgaatgttctcatccaagtttcaaacgttcaacaacctcgatccaaaagcttgagttatatatatgcgaagattcctagtatatatataaccaagtttgattatgctatctattacttttcttattttataatggataagaaattaaaagtgaaaactttttcttatggagaagtgtgatatttgatgttgccactaatttttagtgattttatttatttatttattcattcctgagagcatggttggtaaaatcaaatcaaatttaagatgtattagaatttaggcgtttattgataaatttgtactgcataagaaataatattataagtttaactaaaaaatttattgaaataagttataaagaaaacttactagctagcaagaatgctaataaaatttataagcataaataagtttcacaaactcattcaaaaatccctttggatgaatatataataatatgcatattttgtaatattggccgggtcttgctctcgttaaccggtttttgtttcactttataataaaaagtttttattaggaagttcagtaacattgcattagaaattacaaaatgtgttggaataatttttccataaacaatttctatttctgattttataatcagtattcattctactaaaacacttgttagcatttccttttttttatttcttttggatcaacatgtactaactgttgacaaagtagagaagaagaaaaaatgaaatagatatatagagagaattttcttcataaattcttctgtttcatcaaatatttttatcaattaacatcaatgatacatacttgaaataaaaatggtatggcagctgaaggcaaaagtgttagtaattacgacttcttgaaagaaaatgagcgacaaattgaaacacaaatacattaaaagcttaagtaattaataggtgacatgtggatttaacaatgtctaagcaaaaatggcggaaacaggggtaagagattgagatggctgtctccattttaatgatgtttagctgttaagagtatgacttgttgcatgtgggtctttgatatttacaaattataattcatccacatattttaatacttttttgttcatatatgtacatagggaaataaaagtgaaaaaaatgtatgaaaacgaatgtttatgtatttgtacatattatttaaacaataacaacataaaaacaatgtaatgaattggataagcttacagatctgtttgtttctgatgagtttccttcttcaactatagggtttatgatttattgggtactctattaagtattatcaactatttttagaatatgaactgaagtttgtggagactgtgatgatatgaataaatcattctataataatgagtaattgattgcgagaaaaggctcactttggaaaagccgataccctttaacgcaaaatggctctaaattttttgtttggtgtgaattaatgcaataagtttaagtactgatctcaaatgggggatccgtactttataaaacaaaaaattgaaaaagctaaaggcaaatcttgctccaaattaatttcagcctagttaaaagctgttcaaatattttctctgaaaagataaaaaggatcaactatatatctattacgaactaagcagcatggaaagaaaaaggacaaaagataagaatagttttagtccttttatgagactcaatctcgaaagtatcttacagaagataagaagggaaatggccaaccagtggatcatagtgttatatgtataaatgagtggaattgaagtagagaaaccaaaaagattaataaatcctatcttattttttttaccagtcctagtagctaccttatatataaaagtaaaaagtaaaagtcataattgacttggaaactttattttaattattattttgttggtaattattttaatatttcaatatatttaagtttatttgttcttgtttataattaagttttaaataaattagaataactttaaaatagtttaaatgtttgatttttcatctaattttaatttattttggtgtaaaaataaatgaagaaagaagatagccgatgttaagatcaaattcaaggcccttataaggaaatttttttaggttgaatgagtcaaacatatcaggtttagcacacacttcagatagagcaaattacttctcttgcatgatatttgggttcaaaacacaatcacttaatctattattgttgttgtgtgcatgcttagcgcgacatgttaggctaagtgtgcaagtgcgacatgctaggctaagtgtgcaagcgattatgcaaaaacaatagtgcaacacgtttgaacctatttaagtttcaaggatgcgaattgaaggcaaatttgaagggagttgtctagggttaaaggtgaagactgagaagctctctccctaactttccatggctttcctatcatctctcatcttcttttttatttattttctttatttcttgtagttatctagttagattacctattttggaggttgatgtagttgaactcatccttatgtttacattttgattggtaatatatgtttattgttcattattaagtgttatcttctatgcattaaagtttattttagcttaatcatcctttgcttgatattatggtttgaattgtcattgacaaatacttttgaacttagaaatagagaggaacaaacccaaagggttggtgtagtggtgtaagaccttgtcccattcatgtgagtagaaactatctatttagcgggggaacctgcattcaattttcatcttatgcaaaattttcttgggtcaactagcgacagtctagcactgcgggtggaatagaggaatgcctaataggttttgtgtctttggcatgaaacaaaacttattagttatctcttaactcttattcttaaagcaagtcatttggttatactagtcaagtgattgatagtttgatcaaggagcttaaattctttccatccaagggatcgagatttgagtatttttgtgagttaatcttaataattggactttgaactagatgagtgatatttgtttgcatgagatgatttagtgaaatcaatctcaacttttttattctttattactttatctctttttattgcactctacgtgttcgtaaaaatgacaaaaaatattttgttgtatttatttatgcttttgttatttatattatcgcattccaattaaaattgttgtttatgaatctcatagttagtgaacattgttattttatcgagtattatatgagtcaatatagatacgatgcttaaactttcatttatactatttatgcgacttaatatgtttgtcaagaagctaataaaatgtaataaatattttaaagaaaaaaagaataaaatataagaaaatagacgataaaagttaaagcactatttaaagtaacatataataaaatgttacatgcaagttattaaaataaaccaagtgattgaacgtaagtaattaatgtgttgatgttaagatttcattgttcgagtagtattcgagttcaattcttagtgaaaaatatttattgtttaaggtttacttatctctttactaaattttagattaattatggtctcttttgcataataaattaaagatttaaaacaaaaataaagctattaaaataagtccatttactaaacattattattaatatggtcaaagtttattttttttctaatcatatataaaagcaagaagctagtttaaaatacttgctaaaatactctaaatatgaaaattattaataaatagtaaatgtaagttcagacaagtaattaaggatttgatacacctttttatgagtgcgagttcaaatcctttaagaccacgttcctcacttggtgtgccaacaatactttagaatttgaaggtacttcctgggtttaccactttttttttttttttttacataccaattatattaatgtataaaataaaagattgataaaatatatatttatgttatcaatcattaattgaaaattgatttggatgtactctagtactcatatcatataataagaaagtgagtttaaatttcgttattaatataagaacttccttaacaaataatagataaatatcattattagtcttagacacccatcttatctaaattttttatacacaaaaaaaaggtgcagcttatcctctgggtcactagggaacaatagagggacaagctaccggacgatcataattgcaagaaacagagttaagtagaaatagtaaattcttctgagaaacgcaattcaatcagaaatttgatgatgaaaacggcttgcccccaccatctgccagaattgcagagacccattttgagtacaatcgtgttttcatcttctttctggattcctcgaaaaaatccaatatttacgttgaaaaattgtccacaatttctgtttctgacaaaatgggaccaatctaaattctccccgcatattcgctgtgcaagaatagccattttaatgcttgatttaataagtagggtagaattctgaattttagagcaaacttatttttttcattaaaaaaaaattaaattggtcatctaaactcactttattaggttttctttttaacttttttttattattcaaattagtttttttaaaaatataaaataaccattaaatttatatttttttgtcgctacttcattatatatttaacttttaatgatcaaatatgatatatatatatatatatatatatattatttttcttatttctcacaattataatagttctcacttgatacatgttatatatgtgagtgtatcaaatgagaataattctcagtttaaaaatgcaaaaaaaaaataaaattgagtcgttcaactacacataaattataagattaaaaattatttaatagtcacaaccactaaaaaagatcatatgcatattttttaatcctgattattcaaatggtaagatttaagatctaaaagtgtaggtatagttttcatttatcgtggcgagaagttttctcattttatacatagacatctattgaaaatggtttttatataagaatgagaaaattaaatattaattaacaaggttcaacttagttaataaatttattcaaaaaaaaaaacttagttgataaatatttgagttcttttaagtatgttgggggatatctttggcagaaaacacgagagggaaggtgaatagctgcaagaatgtctcgtaactctgcttgaatgtcgcaatactcgagaattttgagaaaggtgaactaaattcactttggttattttgaactaaaccgttcggagggtatgatcgactgcaccatctgaattatacttaaaaccattgaataattggtagaagctttaccatggcataaatgatttatttataacattactagcctttggttgattgatttcttaagaaaccaatgttctctaatattcttcaagttttattaagttatacttctctcatttttatctttattgcacaaaagaaaaatctaaacaaacaaacccaaatgctttaaagtatgtccaaacaatgaattctcctcatgctaggtttaagattctagcaaaatcaactttattggtgttagttcaagaaatgagtgggtgtggacttaaaaggaaaattttgaaaaattaggaaccaaatacaatgacaaaattttagaggactaaaaccaatatgggtcaatatttgaaggaccaaaataatatttaatcatttttttatcaattgtattcgtaagtagaaatttggtacaaattgaatgggtgtggttaaaataacacgtaaaacccaaatgttgaacggaaatgaaccgataacaatcgaactacaaactaatcatatggtcaaagtggaaattagtttcttccaccatgtctggtaaagattaaagttgaaaaaaaatatatatttttttaagttttcttcggaagcttttgaaccaaacacgcactgcaccttctagagatgtctgtgaagcaaagacagttgtttcgtgtcatcagaagattatcataacatttgtcaagaacagcgaaaaaagagggcggggatcaatcatcagttcaaaacaaagaaatcaaattgaggtctcagcttgcatactcagaaagtcagaaggacgaatctaccttgatgaattgatctgatcttccatatgaaaatatcctattcacaagtttgtacaagcagtctagcacaaataaattatctggtctgtcattctgtgtcaactgtcaaaaaactgtcacaaaaattggggggaattgacacttccttgttaatgggtataaagaatggaaaattgaaagatgttattaccttgtgcagaccctaatgacttctcagccaaaaatgtatttagtgcagtaacgtattaccatactactctcaggttctgccatctacatcaaagccagcaccagtccagtcaggagttgaagacctagttttgggcaccgcgccaattccttttcctctttgatagttaactttctttttatttcttccttcttcactaggaggctgtggtttatgctcattggtcactggaactttcagaccattattttggtatggaacattcccagccgatcctccttggattgcactatccagagaacttgatcttccatcctagcataattcacatgcaaggttttaacattcaccagaataatatgaatatgtttcatggggcaagtagcatgtgtcagacagaaacaaatgatgcatgtatagtcaacgataagcaggaaacaaagatattttcagtggataagttgcacaaccagtgtgcattctcttgtatatgacaacccatccctttgatcccaaagtcagaaactcccaatctatagaaatatcatcggtttgaaagcaaaaataaaaaatcatcggtttgaaagcaagcaaccatatatagttgaaactttgaacatgttagaagtttaacctattatttaaatatgtcggacctgtaatgactttgatatgtgttcatgattgagttagttcaatggcttggccagtaccttttatttgatatgtatttatgattttgatcttggagtcaggtttgacaagattgagaatagacattctcataatacagaggcagaccagtaagtattaaagaaggtacatcaactcaaccaccaatgtaaaacacaataggctatcatttacatgatgccataggagctattgactatatagagatctgagaatgaggagtgtgataagaataacatacactatgcagactagttgaacttcgattcggattcatagcttctaatcgtctttttaaatcctccagcctagacaactgagagttattgctctcttcgacctataaaagattgctactatcaaaacacaggatgaaaatgtagaatattatggccctgttcagataaaattttctttgtgtacttacaagaaaagaaaataagaaagaaaaatgaaataacctttgtccataagctaaaattagtttttgcacaagttgaaataaactttctgaggaagctaaacgagagaagcttctcgaaaagctgatttgaccttaagcataagctaattttaccttaagggagaagcatattcattttaccttcctattttcttctcctataagtacttcaaagcttatcaaaacatggcctatatgtcaatatgtctttgtttaacaatctatttaccagtttgcttaagtcttcacataacttctgctttattgcctcttcttcttgcactgtttttgatgctgattcccacacctgcagcatatgcagtcaagatatactataatggaaaagataattaatgatgcttatcaatgtttttggtgatcaattctcaactcttccattaaattgtgtaggcagtaaacctcttatctaagccataagtcatccatgctgatttaaatgtgttcaatttataatttaaaaataagataccaaggagatcaattgaaaaggaatacaataactttatcaaaaataagtaaagaaccaatcaatgcatatgcatatgttgttgagacaaagaatggttaaaaatatcttttttttaatgtgattggttcaacttattttgagtaaataatcacacttattttggcttccaaagagagtttttgaaaaagagattatttcccttaaaaaaagttcaaaacatgctattaatagagtcatactatattgacaaagaaaagggggaaactagttaggtataaccgtataagtataatgtcttttatttaccatgtaaattcccatttaacccctaaatttgttagtatctgttgctttagtccttcaccttgactttgcaaaatccacattttagtccataaccttgcaaaatgacattcactttagtccttttttatgcaaaataacagtggaatatgaagtgaaaaaagactaaaatgaatgactttgtgaagtcaagaactgaagtgagaattttataaagacaatgactacactcagaattttagagactagattgagcgtttattctttatttaccaaaacaaaatgatgtcatgaactagaatgtctgcacaattgttgaggttaatgttaaagagcataagttatttccaatttatgtgattaaatgagtttattgagtaaaaatttatccaacccatttttctaacccttgtttcttattcagtatatgcaaatgatgaatgcactgctgagacaaccattctgcatttctactagtgacactaacttaaaggtaaagtcacatttaaaaaaaatcattcaagctatttacaagcagcacaatactctgttaacatttctttctccagcctctttgttgatctcactgtaacctcaataactgatgtcacacagtaaaacggtagtgacacacattaaaaaagaagcataccttgcgtgcctgttcttcctgtatctttgccacacgaattttctcggttgatgcctctatcttctttctcatatgttccagcgcttgaagtaagcatggcatataagaaagaagcaaagtcatttcacatttcactaattagtaaattacaactaggaggaacaggaacagctcttaatttatgcaagaggaaacaatgacataaagaaaacctgctttctttggtccagatgtaagcttcatctctaatccaagatttgcaagctcacgctccacatcacgaattttagtatagttttcttgaatgtacctaaaattattttacaataatgaaggggaaaaaaagaatatattcaatgatcatagaagaaaggcttttttaaacacagaatatttttaaatgctccatatgcttaaatgatatccgctgttattgttctggtagtatctgaatctgaattcgattcttaatccaaagaatccaaataattcttgaccaagttttacttatcttccggccaaacttcaaattaatcagaactttttttgtctgacgaacaggaggattaagaaaaaaaattatatctgcggctttataaatttattagaaataatttgtaggaaatcaagaaaatattaattaattttccccatttatcaatgcctttagatatctccacctaaatagaaaccgtgtgaatcgtttggcaccactaatgcagaattgaagattaagaatcaatgctcaatatattattaaattaagcatgaaatgaccaaaattaaaacaacgaattaagtagtagcagcatttacttcttcaattgaagctgttctgcttcgattatctgcaaaaaagcaacgagattgtgagagattgaaaaacgaagaatgaagagagagggagggagagagagaacctgttcggtgtaagtgataacggaagattgtctgggaagaccatcggatccgatctccgggacaaacgacgggtttgaacccattttttctgaatcggatccaccaacaagccctctcttcctgcaccggcaccaacaccaacacaacctcgatccttatctcctttttcttttttttcttttgagacaattttttctttttcatttttaggaatgggattttcagcaactggatttttttaaaattgtaaaatatgtttagttattgttaatttttctatcgaaaattttgtgagagctttgtttccctaacaaaaaattaatattattttcagcaacttgtttccctatcaatttttttttctttctaaaaatattaatttattattaattaatatgaaagggtttaatactatgcttaatcatatttgtaaaaaatgaaattaattcataaattagcattttcaataacattttattcttgaaatactttttatacttttttgttcagtatagaatttttttatttgcttgtcacttttctaataatattaaaatattatatataccaaactttacttaaagtttgcttcttgaatatatacgattttgactctttttagattatttttcaaatttttattttattctttttaaagtattttatttatcgttttccttctagtgataggaatatagatgcatacatttcttaaatttcagtatgcaaaaattttgttgcctcttgctgaatagagtgggttaatttttttattttttcaaaaaatattttaattataaaatatgataaatattaaataaattaaatatttatttaaccacactaggcaaatatggctatgtttctctaggcaaatatttaaacttagctctagattttttgagtgtggtttaatagaatttgttttgtatttcttttaaatttttacaaataaccaaatagtaatttgtgtacactttttgtaatagagcaaacaaaaaatgaaacatttgaaaatattaggaattatagactttttgttaatctacgtaaaacataatagaaaagagaagatgaaagagaagtttccagacccttgcaaggcaaaacctaatgacatagaaaaacaaagaatataggagaatgcaatcatattcaaaaaaggaaaagaaaaattgggagctgacttccaagtgggtgagtcttcaaagacggcaccagatagaagagtggaggctttgaatcgcaacggggcaaactatgactcatatgcgagtgcaattgttaacaaaagaaggattgaaaaagagatacaaaggtgttgcctaaggagaactcaaacaaagagggttcaattggagttacaatctatggtacaattaacagtgtcgttatagagaaaatcagggttgacaaaagcatgggttgggcgtttgtgggacttggcggtctttgatagactagagaaggaacttatgtggagtggtggaataaaagtaaaaccaaagtatttttaggtggtgacatggtattgctaatgggtctcatggaataatgaagctgatcacttataacatcagaggcctaggagggagtgttaagtgaagttcaataaggagattggtactaaaaaaacaagtggatatgatctgtttgcaggagacgaaaaaaagaaagaattgatagattcatttgcatagagttgtggggtgattccgaagtttgctaggcagaaagtccaacaataaatacgagaggaattgtgtatttggagtgagacatcatttacaatgcaaaggaagatagtgggtagtggtctcataatgcttgaatgcattaggaaggaagatggagaaagaattgccattgtaaatatatatgcactgtgtgacatagtattgaagagagctttatgggaagaaataaaaaagattaagcaagaaagccagctagacatgtggtgcatcataggagattttaactatgtttgcaaaaattctaaacgcgttggggctagtcatagagattagggcaacaagatgatgagggaattcagtgtggtgttggaggatcttgaagtggaagatatgtcatctgttggacgcaaattcacatggtataggcctaatggagtggcgaaaagcaagttagataggatactggtttcacatgcctggtttgcaaaatggcaagggagcacccagtatattctgaactgaaactttttcaaaccattgttcgattctcctaaagatcaataatgttgactgagggcctaaactattttagttcttagattgctggtttgaagacaagtcctttaggaatgttgtgtcgatgaatggagaaacactgttatacacatgttgggagactatgtattgaaagaaaaactaaaggcactaagacataaattgaatgtatggaatagagaagagtttggggacatccagcaaaagatttctctaactagagagagacctcaatgaactagacaaaaagggtgaatctgctaccttgtcagaggaagaaatgattatgagaaagcaactacaaggcaaattatggaagattgctcactcaaacgagtccattataagacaaaagaccaaaattaagtggcttaaagagggggattgtaattccagatattatcacctcttagtaaactggaagcaacgtcataatatgctaagaggtgtggcggggaggggcgggggatgggcttgaatttaagtcgacacaaaaagaaggaggaggtcaaggttgctgtttgggaatttggcaacacaaaaagtccgagaccagatggtctgaatttcaagttcatcaaggaattataggacgtaatgaagatggatgttatgcgtttccttgggaaatttcatgctaatggaattctcctaaaagggagcaatgcctcatttataaccttgattcctaaggtgcaggatttgcaaggtctcaatgaatagaaacctatttcgctcataaggtgtatttacaagatcgtttccaagatcctatcatctaggcttaagaaagtgttgcctataattattgatgagtgacaaagtgcattcacaaaggacatacacttactccacagtgccgttattgctaataaggttattgatgaagcaaggagatataagaagagatgcttagtctttaaagtagactatgagaaagcatatgaattagtgagttgggagttcctcctctacatgctaaagcatatgtgcttctgtgaaaaatggttatgatggatagctgggtgcttgagatcatcatttatattagtgctggtcaatgggtctcccacctcagagtcctccccacaatgaaatctcagacaggggaacccattggcaacattcctgttcattattgtagtagaaggcttaaaagctttgattcgagaagctcagaagaagaagatgtttgggggttaattcgttggaaggaagaaggtagaagtcaatatactttaatatgttgacaatattgtgatggctaatgttgctgtcatcaaaaccatgctccgaagttttgagatggtgtcgggattgaaaattaattttgcaaagagttgctttaatgcttttgggatgtcagatgagtgggtaaataatgtcgctgattttctaaattatcgcttgttatctatgccctttacctacttggggattcccattggagctaacctaaggcaaagcgagacatggggaaccatcattgcaaagtgtgagaaaagactatcaaaatggagacaaagacacatatcctttggagggagaatgactctaattaaatatgtgctaacatctattcctattttctatttctcttttctcagggtcccaaagaaagtggtgggtaggttggaaaagttgcaatggtggttcttatggggaggggaagatgaccaaaacaaaatatcatgggtcaattgggaggatatctacacatctagggagaaaggaggattggggatttgagatttgaggaagtttactattgcaccgttagggaaatggcattggaacttatttcataaccagtgggagttataagcaaagatcttggaatcaaagtacgcaccgttagggaaatggcattgaaacttatttcataactagtgagagttataggcaaagatcttggaatcaaagtacggaggatgaatgaatatggttgaaaaaagaaggaataaaaaggaatggatttggtggaaggatttatgcgctgcatgtggggcaatagaggaaggtaggtggtttaacaatgctgtgaggtggaaattgaggagcgataaaaagaaagttctgggaagatggttgggtcagaggaggtgagttgatgttggggaaatacttgagactctacaacatttcagaacaacaacattaaatggggttggctatggaaggggtttgggaatggagtttcagatggagaaggaacgtgttgaaaagtgaaataggaatgacatcaaacttcatgcaagaattagaagcgatacatatacaaccttaatattctgataagtgggtgtggatggtggatcaaagtgaggaatatacaaccaaaagtacatatggtttgctaagttaggagggttaagtggaggacaacaacaatatagaggtttttgtagatttatggaaaatgaaagtgtccaacaaggttcaacattttgtatggagactggtttgggacaaattgccaaccaggaagaatctaaggaaaggaaatgtagatttagaggatgataaatgtctgttgtgcttaacacaacaggaggatgtgtcacatattttcttacactgcccaaaggtgttgcctatgtggtgggaatgtttatcttgagtacaaatcaaatatgtttttccaacaaatccaacacatcatttcttacaacatccatattgtcatttgctttggctaattcagaataggtggcgtatcctgtgagcttctctcacttggtgtatatggtatcaaaggaacaaattgatcttttcaggcaaagcatttgatggatagaaggtcttggaacaagctctattttttgtataggaagaaggtgatgctaactaatttttcgttgttgttggattctcagctgcattattagttactggactttggtgcacaaatatgtacttcagcttgtccatattaggacaccatagtttaatgtattgactagtatgactgagctgtacatatatcagtacacctctactgttttactattttatatataatacatatttatttttgtcgataaaacaaagggactaaagactattattacttaaccaatactttgaagttcaagtcttgccggtgtgactgcattcaaaatttgcaatatgagctttgttgcttttattaatcttactcaacttgatcttggaaatagtgggtcaaattaaaaccccctaccaaagacatgcaatttcaattatcttattgggttacacatatatttttatttttttatcaaccaaaaccaatattagatgttagatcatttcttaattaaaactgaataccttttatttgattacaaatattaaacctaggaaattcgtgaactcagctgttacgcaatcccaaaacttgagagcaaaagaaaactagaattaatataagaaaatttcatagacaaaatttttaattaaaaaggaaaaagaattcagcatcacctaagctatagcttaacaaccaattataacaaaaatctgtcaatactgtttatattacagctgcttctagtaagaattgcaagatagcttcctttgtaggtagtgcaggaattgcacctctctcagttacagtgagggcaccacatacattggcaaaatataaagcctttcgaagacgtttctcatcctgccaaccaaaacaaatgtataaattccctatgcaagattgatgataaaagtatatagttaattgactggtcatattgttccatttcaagaaacatggtctaaaaaaaaaaactataatattttgcaaggacaagaaactaaaattgctatatttgcagagatataaaacatgttgacaatagcaaggaccaaaaccggtgtgacaaacattgcagagattaaaaaaaagtaaaaattacagaataaaacatttgtagggaccttaaacataataaatatttaagccttttgttttcaaatcttgcacagagcacctaaacactatgccactgattatgaataaacatctggtttaagtacatcttccaccattgtaaaacttctatctagcacacttcacctaaagactatggcactatataataaacaagcgtgtgctttaaggacttcttccaccagaattcatgttgcagcataaaacatggttgaattgaagtgatagaaaccctgaatagctattaacatgtaataataatcaaattccctttgcaactgctgattttcaataaatgtgataaaagtatctccaacttcaatctctttattcagtagttatttccttcagcaatttattccaaaagtaaaaggttaaaggactcaacactttaggacatgaataaacaactagagtgcacaattatatagcttctgaagtcaacatcaacggaaattaagccaaaaaagagcaatatcagaacatggctccacaaatttttattgtactgtatgagatacagatggagccaggacaatttaatctaaaaccagaacaagtcaaaattcaaaaatacctgaaaaatagtttggtcagaagctatgcagtataaaatcccactaacaaatgcatcgccagctccagttgtgtctacaggtttaactttaacacctgcaaccctgcccttaaatgcctgcaaagaaattttggcaatcacaattagccaaacaatgattcacaaggtgcaaaaaagaagacatgggtgagtcctaaaaagcaaacttcatatcagttttcactagctactagtagtcattaagtgtattggtacattcatactcagaagtcacagcaattaattcagtccataactcattagtgtaagtgacatgtgatatttgtccatgaccgtacctacaagcacagtagcacactgcacctacacggacagacccccacaaaacaaagcacagatgaaaagataaactgtgtctccaatgagatgggtgacatcatagtcaaatggttatggtaagcataccttcgtgtaatatctgcaaccctgtgaaccttcagtaacaattaaaagcttgagatttgggtgaaaaagtttcttcaaaacaacattatcatcataaggatcatcacccccagtcaaaaatgtaatctcatcctcacttatctgtacacacataggaagataccaagtcaactctattaaggaaaatagaaagggataacagaattcttattttcaaaattaaacagtatagcagagagtaaatttaattggggattagtatattagcatttatgaagaatatcttgctcacatatgttatacctttataacatcagcttgatcccatatatccattatgcctttccgagcggagtctgcagaaggccatagagccaatctcaaatttggatcatatgatagaatgcaaccagagtttttggcaatgctcatagcagcaaggtgagctgacttgcatggctcatcaatcaagctgatggagccataatggaatattctagcctaaaatcaatgttatgaaaatcatgattagatcaaaggtctcagagcagcatttcataaaatacaaacagatattccaaacacctgctttaggatatctttatcaagttctgactcttgaaggagcatatcagcgcttggattgcggaaaaacaagaattcacgttctccatccgctctaagtgtaacaaaagctaatgcagttcttgcattagagtcaaaccgcatgccagacgtctcaacattgttctgctttaaaatgttacccaacatgtacccaaattcatctgctccaacctaataaacagatggcaatgaattaagatgtgatttctattctagtagttcaagcaagcattttctttcctcctcttttcttttccttctaagaacaggtgcacaggaacaagtttcatcagaactattcagtttcaaagatagcatatgacaaatatgtataaatattcagatttggacaaatcattcaggacaatgtgcagatagatagtaacaagaaagtgaagaaattatataaccaacaggatcagtgaagttgattgaaaactacaccttgcctatgaaagcagatgaacctcccagtctagagataccaacagccacattggcaggtgcaccaccaggagctttcttgaaagcgggtgcttcagccagtgacactcctcccaccgttggaacaaagtctattaacatttccccaaagcaaacaaccagtgatcttgtttccttgcaatcttcttttttgagatcatgggattgacctgcacacaagcagtatcttcagaccaacatgagccatggtttgtcataacttttaattcgtaacaatgtgatttcagactccagagtaaaaaagtaaaaaaaattgaacacttcaagaactaggacaatcaactcagatgtgttctgctatgttatgtgtccatcctctcacgttactaaaatcacaaagactcagtacaggttgtattttgaattcgaatactaattgtaaacagttagaaaacatgacattcatgtgcatcattggttcaaataatgtactttcaaagcacccatttctgctcccaatacatgccttggattgaatcacacagatcccatgcatacatgacataagaaatctcttcacccccaaggttttaaaaagcggtctgggaccatgctttcagcctcaacgttaaattgtttgggctctttgttgcgactgcaattgtggctgcatttatctacaattgccattttccgcaatatcaaggattgcggcaaaaccgtggctcttgacgactgcatcgtgaccacaattccagctgcacttatctacaattttcggcaataccaagtaacacgatgaaactgtgacggcaatcgtaatttaaaaccttgcttgatcccaaataaaaaaaaatatccaaatacatcaactgcagcatagaaccccatacaaatgctaactaacatcagcagtgattacagaaagaccacatcatcatgattttgtacctctgcatggaaatcacaccccagaggagtcatttctcattcacaaagcatgcacagatattgacaaaagataacagttccaatcagcagaacgaagcattcacaccgacacactcaacaaagatctctattttgattcagtccaacaaatcccaaaaagagcaaaacccaccactcataaaacctcagaaacaatctttatcttaaaaactcttattccaactcatataaataaatacataataaaaacaataataatcataatagttacaatacaagaacataaaaaacaaaaaaaaaatgtgggcagggaaagatagagagagaagaaaggtgacaaaacctgatgaggtgggatgagccatttatgaatgatgatgcaatggaaggtgtgagattttggtggcaagaagaaaacagaggctattaacaactactttgttgttgtgtaatgaagagagagaaaaaaacacggaagcagtgagaaaagtagatgagaaggagagaaattggttggtgtttataacaagtgaggtggtaacaaaaaggaattcaacaacaatcaacgcgcatagcacccagattttcactttctaccatattttttctccaaccagttgccagaacaaaacttttcatcatcaaagtgttttcaacttcgttttttccttcttttccctcaaatgttataccaggggcatggccttttgatgcaattcatgtagacacattataaattttaagggttaaaatattataaattgtaaaaccgtgaacccattaaacaaagagaaattaaaagtatttttttcaaaaatttaaaggacggataaaaatgaattattcttttaaaaactaaaaaaataattatttaaatttaaaagattaaaaatatatttaagcgaggacaaaatttattattcattcagaaattggagtactccaaatgataacatttatttatttttatgaggatacatttggtgccgttgtctctttcaaatttattattcatgtggagtagagattgaagtttatttttggagaaaagtattaaaaaaacttttttaaaaataactttcaaggtttaattgatttgtacctttttattttaatttaatagattttcatgatatccaaacaataaatgcattcaaaatagttatcgataaatcatttattaaagttttcgtaataatcaaacaaaatatatacgtatgaaacctgctagagtacgtttaggtgatatgcatgaaatctaaagttctaatctcaatgttgttattataaaaaaaaatacatctaaaattattattatcaacaactcattttcttttttataatttaaaatatttttacgataatcaaataaaatctgtttccaaaataattatcatatactagggtctacatattgaaaaacatgcattcctgaacatatacgacaaataagaaaatttaaatctgataaaataatttagagcgccgatagtataaaaaatacattgttatcaaattataattgtcatgtataataaatttattaaattttattataattactttaaaaatcctattcatcataaattttcattagtttattttataattttttgatattaacacgaaaattatttaatcatgaatttgacattaaaatatgtatgatagaataaaagaaatgaatcgtaaaagttggccatacaaccactgtcaaagttatgaacctaggattattttatttttagatacagtatgaacctaggatggactcttattcctttccgcacatagcttcatgcatattcgtagattccaataattaaagaattggatgtggactccactcacatgcacaaaataattgaagcgtctaccttgtatatatattagctgcttctatgtactgtccctaaggtatgccacctttgtcattagaaatataaataaataaaaatgaatggttgagattattaacttttacttgtaaactattaggtaatgcgttttgcatacagtttaatgactaattctcctattaaaatattatttgggtcaatttgcaaaatttagttagatagatttagcaactatgaccctaggagagcgttttaattttgaaaaatattattgaactatcatccactcaaaaacaggacataagctactggtatgcattattgtatgagaagaataagatgcaataaaataactgtgtttcagggaatgaatgcaacaaccaaagctaagaaaatataacatacacacaaagttttaaaatataatgtgtcttaaaaaaatcaggccaagaggattgaatgagttggaagggtagggaattaagaaacagtttttgaagctaagaagggaggagagtgatgatgttgaatgaacatgggacctctttgtaaattttgaatttttttaatgtctcatgtaaatataaggtctgggaggatgttttacttaaccatgatgcttttattatagtgggggttcatgctatttagctatatgtatgcagggaccatgttcattagtgcttctaataccgggtggtcattggaactccttgtgccaattccacttttaataacatacttttttgctgtgaaaaaaaaaaaagaatagtgtaacaaacttcttcaccttctctgaaaaaaaaaattaacatggtctttaccttctattgctagtaattttatgatacctcttttaattatgacactttttcagagaagtggcttaactcaacattttaaaagcatcatttttttttaatttaatattgctagaaaaggtagcacttcttgtaaacattaaaagtggcgtgaaagcactaataaagatctttgatgtagtacatcacaaagaataatgaaattaggataaaaatatttctctctatactatcaaaaatttatcaacgatgatgcccatagctaaaatatcaatatttaagaacatcttctaatgacaatttatacaatgatagttgaaatacataatttttcctctttactgttgcataaagtacaatatcttattttaggaacaatgtgtgtgtttagtagaaataatactttatataaactattttgtgaattataccaatacatgggcacccctgagttattgatagatattttttttcaacatgtaaattaaatgaatattcacaatagccatcctttgtttttgttgtgactgctttgactaccgtctgtcttggtatcaattgctttttcctttgaatcttggcgttgaaacctactgcgacaaatatatattattttaattaaatgtcaagaaagttaccatatgatttacacataaatgactccataatcttataagacacaataaagggccttcacacaacttgtatcttgaaatggtgatggtaatcttacgttgagaatgtaaataaattaatggagttaactgtaaattatataagaacattttgtgtatatatataaaatcttgattaattaataacattcatatacaatctattttaattgatttttacaatcatagatttatattgattgaatttttaactttgatatattaaaatattgaagaaatacaaaaaaaaaattataaaggaaataaaattaaaattaatattttcattaaaaacaaaatatacgtaagttttaatttgaaatgatattttgtcaataataaatgataatgatggagctagaaaattttctatgtgatcaagtataaagaataaattaaatcataaatataatcaatattttaaaaatatatattcatatgagtttactcaaattttatgaatttgatgaaattatgaattaattttaaaaaatataatatcgtcttttttaaactattcttaccttttgagtgaatgagaataaaaagatgatcttatttaatttaatattttttcatgggcacataaaattttagggctggccctagtgattgtgaaatgggtattgatgtgttagtatacacattgttaataaataatgaggtatgaaatgcctatcgtataaagttttggtttaaatatgtttttagctaaaaaaatttggaataaatttattttgtcatttaaatttgaaattaattttttaattcttataatttgaaaataaaatattttagttcatgtaatttactatttaaaatactctattggcaattcttttaggatttctaatttattttgtatttgaggagtatctcatcacaaacaccaaccaaatatataagaccaatatagtcgccttttttatgcctatctagctatacacatcatttagttcaagaattatatatgttgtagcttcacattcttacttatgaacttactaaggcattaattaggctttaggaaataatgcttatttttagctaagttctaaaggggcctaaacattaattacattattgacttaaatatgtttgtacactctttaagtttatttttttaatttcagtccatctaggttagtgctttttcaattttgattttttgtaagtttttttgttcatttttagttcttataagtttatgtttttttaattttaattctttaagattttaatttttttcatttatagtcctcatatgtttatgtttacaaaaaccaaaattcgaaaaacacaaatttataaaaactaaaaataaacaaaatatcctatagaaacaaaaatggaaacaatacaaactaatagggactaaaaatgaacaaaaaaaatacaataatcaaaattaaaaaaatatataaatttacagaaattaaaaaaatatttaagtctatattattttattctatttgactaattttacttgtgtatcttaatcattcaataaaaaatcattagtagtgtcattctttagtgaaaccaccttaaatggaattagaataacaaaatatagctttaagttcaaagtataccatgttgaatgcaagattaacaaccttttacattgaaatgagttatattcacattgacaaagtgctcatcaaagattcaaagatgattattatgtggtgaaacaaatatttaaccatttgttctcttttttgtatttgaaaaactaaaggtcttaatgatgatacaactcgcttggcacatgtggaggagacatgtttgggttttgtctatagattagaagaagttaaaaaactcccaaatacttgaatgtacaagataccattgtcactagcaatagataacataaccataaaaccataaccaaggtagtgagaaacccattccaaacctatatgacataaacgtcccaaaacagtgcactaaagctaggatgacatcttatatcataaaagtttctcttttgttttctattataatgcaatattgttttagtgtgtcaaaattgtttatctatttcgagctcaataagtttttcatcaatagaacaaaagttaaaaggaacgaacttcaatttagaatccctcttaaggataaaggatggtaaaaaatgtcatccaaaaatataatttaggattttataggatgcatcataggtgcaattaagcaattaattattcaggcttgtcaaaagttttttttttaacgatattgtcctttaattttttttccttttttgttcttagtaataatgaatttcacaatctttgattaacaaattctgcatatacctttcacgtgatatctgattaatgacaattttttatatttacaaaataaaaggctaagaaaaacaatgcataccatgtgtttagtgttgtcccagactcaaattgatcaccttgtgtagcatgcacttgaatgtaattgttattgtcaaggatgaagcttgagaattcatctttttcctacaaataagttttaaaatgaaagtaaatatataaaaggaattatcataattttttttgaaattgtataactttactagtcaactatatttaaatggttatttaaagagaaaaccttggactctaattgtttgttaagatcctccaacttgtgaacctgcaaaatatatatatatatatatatatatatatatatatatatatataaataattaatgacaagtcaaataaataaatgacggtgtacatatattatttgtgctaccattaaaagttgaaaaaaaaagaagaaatctccaacaattttcgtatataagtacaaactttctccgtcaacttcatatgccaacttcacttaccttacaggtagtaattttttcctgaacaatataattaataagatagacaataatttctgtagccccgagttgtaaaacaagaaaaacataagcatgaatcagtgaaattcacagaaaaggttcacacggagtaataaaatccaacaagtcaacaacatgacaccctcatttagtagttgaagtttaaatatttcataccttttcgcgtaattcatctgctcgtgccaagagtttcttcgtctgcagtttaaaggttcatccgatgatgaagataataatgataatgataataataaataaataaatatgtttttaatctttatatattattttttacattttaatcctctaatattgttgtccgtttgttcttcttcttattctttttttttttaatttttgttcttgtcgtgacatccaacttattcacttaattgattttaaaataacctttttcacttaattgtttagatctttataaaattatttttttatggttctctcttataagtttttcattttaatcccttaggcaatatcaagtctatttaattttccaatctttattcatcatcatcatttaatagaagaccttaagattttggaggacaaaaaaataattttattgaaagaaaaaaacatattaaagccataaaaaaattgaaaaataaaacaaaaagtcacgcattttctgaacgtacataaacatgtataaatggaacacacaagaaaatattttggccatagagggttttaaggttttggtttattaagagcactatagtacgttttactggtttcaatcagataatttatatattcaaatgcatcagtgaatacagctcatttaatgagattacttgatgctgtcgagttagtgcgagcgttatgtctagttgtttctcaaggctctgcaaatctttaaagctaagtggctcaagttcttctccttgaaaatgccttcaaacacaaaaaagaaacattgtaaagcatttagacttatatagtacaaaacatttattgtttctatatatttatttggagtgcaagagtacttatatacgtcgtaggatcagtttatagtataccattaaatataggggtgaaaaatttaaggacgaataggttcaattttacttcattaataatgaatattttcacccttatttttaaggctacaccaaactgatctatataaaattaatactcttaaatatactttataaatcccaactttattctcaagtacctttgtgtcagctcaagtgattcatatttcgctcttaatttcaagaattcatggtatgaactctgcaaggcacagtgatatatatggtaaaatagtatattgatataagcacaacctcatatttatataaattaaagaccttacaatagtgttgaacagctagaaaacggtttatggtttacattatatatagtcataatcacgaaccccaaaactttagggtttccttttttttttttgtctcccttatatttgaaagaaattgttacacaaaagaagaaaaaacctgtgaatcgtgttccaatgaatcgtcagtctgcgacttgctgtaacgacattggcgatacctctcaatgattttgttaatactgacaataataaaaaaaaaataaccggtcactattaattgtttaattggagtaatgcttgataaaataatcagttataatgtacaggaacgattgagaatcatttacggaaaaactaagtttactgccattttgaactaaaaaagggttcttaatcgtaatctatcacaaaccaatcattttaattaaagacatcaaaataaactcttagaatttgaacttaaccgaactcaatcctacaaattaaaactaactttaaagtaaggactacttaaattttaaaagtctatgtgagatctcaacatactccctcacaacagagcatggacgaatgtgatgggttgagctctctcttacacctagaaatagacatctaaggcatgtaacgggttgagctctcatgtagtaattaaatgagtgattcctattctcatcttgtagctataaagctattgtcctattagatagtttagggaaagacacaatgttgtgggaaatccaaattgctagatagagatgagttctccctcatttccttgctcgcgattttggatcagagcagtggccatggaatcaaggttctctctaatatgctaaatcaagattttggacaaggattcagagttctttcaaggtatacacattataaatcctcccttgactattttggtgtaatatgaatatgctatgcatcatcgtattttgccaattccatcaacaaagtcatcattcttactgggatcatgatttatttaagaatttgtttgtagtaattaataagataattcaaagttgaaaaactaatttttaactaaaagttgaaaaaatattttttagctaagatattgtagcaaaaaagctgaaagttgtcaaatttagttattaaattaaatattttgaaaaattaattacataaaaaagtatgttttttaatatctctattttcagtcaaatgtagttaagatccttgtattttcaaattgatgtatttgatcctcaaaattttaaaaacttgtgaatttttaaagatcaaattcattgatatgaaaatattgaaaccttgaagatatttgatcaaaagtatatgaactaaaaatatattttttttctttaaattaattattaatctagtagacaaacgtaaaccaaatataaaaattattttttgtatgatttttttaaaaattgaatttttcctttgtagacaaaaggtatttttcagttatcatacttttagggtttttttagttgatatgaaaatctaactttatacacactaattaaatatgaaaaatgaactcccttagctaaacctctaaacgggagcctatcatcattaggtacacatgcatgcatgtaaatcatgtggtattgaagattatttgtgtataaaaattcattacgtcaattacatggcacactttttgttcaatcgaattaattctctgtacatgtaagtgtttatgatgtaacagtttacttcaaaattttaattttagcatagatcgatatagcatctcaataagttagaatatatgttgtatgcatatagaggtaggcgtatataaatccaatgtatacattttttttttaacccataggtctatagcgtatatccaatgaacctctcatcaagatctgaattcgagacctctagcgcgaagcacacggtggtgtttaatgcatgtataattataaaagtgaaaatgcaagagcatgaccatatctttttctcttctcataaaaagagaaacaaaatttaagaattataatttgaaaaaaataaatataaagaacaaggttagttattaattaactcaaattaaggtagatcgagcttggagtttcttaatgaaatgcaaatcacacatgcattcatactttgttcactatatgtataataaccaaaacttcatagtatgactgtgcaattaatttttgaataaaaaattgtctagaaaaaataagaaacaaacaagatcagcatggctggaacttaagctataccccaaatatactttttaattaatagaaaaatgttaattatttccatatactcttaaataactcaactacaaaaaatataaaataattagaattgcccaaaactttatatattatacctttgtataggaatcaaaagtaaataccacagaatttaaaataacttacccatcttgcttgatcaaatgaacaaaactctactcacgcaatagagatcgagtttataataaattaaactttagtggatcaatacatagagactttgcaccatcccataggccccaaccatgtgggcaaaataaatcaacagagaaaaagaaagatgagagggagagaagaaagaaaaattactcagtgctgctgtactgaaaaagcttgccacggctagaaaagatgataagggcaacttcagcgtcacatagcacagaaagctcaaaggccttcttcagcaacccacttctgcgttttgagaatgttacttgacggttgatcttgttctctattctctccagaacaacccttcctcttcccatgttaattttctctctctcactcacacagtaaaataactatgtggttctagattgcactcttctctctttatatattattctactgcagaaggagtaatggatgagcaacaaagataatacgatcaagattccattttctacttctatcggcaaactgatgactacgcttttccccgcaatatcaggtcaagaacacatcgtaaagctaaagttttttgtaatttactaactactgattagtattctattgtttatgacgttgaaatattgcattcgtgtaaacataaaaggtgaaaatgataacaaccgacaatgatgtaatagatcaaaattaatgtgaaattgtttgaacctaattagtaattttcaacttgattattagatatataattatgttaaatatttagagaaaaaaaagaatctaatttttcatcattcattgtcttagttaactctaataaaattgtttctcgtagatcatatgttcataaaaaacaaaaaagttgaaaagaaaagaaaagaaagagaaaaataattataattttttaatggaatatagtatataaagattttaataattttatgagacatatatcagaaagaatacaatgagtcaagtgcgggagaactttatacatcacttccaataataactttattccttacaatcaattggactaatatgcaatcagagtttaaatttgagaaagaactatttatcaataagattttaaattgtaatcaaagtcaccgagtgttggaatcgggctgtcatgatgataattaaaattgtaaaaatatatatatataaataaatacgtacgattgagacatttgacattatcattacaatgcgattatgaagactccaaaatcataatattgccatttcaagtgcatttgtaatttaagaatgtgttcagccgtttcaacctctattttaggtgactgaaaaaatttgttggattctcattcatcagtatttgaacgtctatctttagaaacacacactaaaagtttaggtgtatcgtatagaagaatatatgctagagaaaagaagagagggagaaatgaaaaaaatccatctgaggaatatgtatgcgacaaaatggtaaccttcgattttctcttttgcttgatgatgccttttcctttttcaaattatccactttctttggtagagacagccatgtcaaatttttgtattcatattcttaaaatattaatatgcttttaaaagtttaatatgcttttattattaaaaagcaaataattttttgcttaattatatcctaaaataatagtttaaattatttaatactactcgcatatttaacaataaaaataccttgaaattgaagtgaaagagacattattaatatttccctatatatttatattcactattaattaagacaacaaaaaggtggttttgtaccaaagaaaggcaataaaacgtggtacagtaacacgtgtcgatcaacctgaatagaattttttacgttagcttcattttcagtcataatggccattgaaaatgtgtgtggcgtttgtttttcatttggttaacaatgttcatctttgtttgtcatcgatgattctcagtcacagtgtcacttcaatctcatcatctaatctataaggcaatttctgctttttctttttcttctttttcaactttgccctagatgttgttggacctaataagagacttttatcatttggattcaattccactgcacttggccacgtttcaaagccctaatggttcttgttcatgctacaaaagctgtagctcacttcaccttacatctgtttcatatgaaaaagatgttcatccattgggaattcgacaccttgcgggttcacaagtagtgttacgtgaatttcagtttttgtttttatttttattttttaaaatatatacgtgtatactttgtcgtctcatatgaccatatttcaggatgaaagttgtacacaagaaccccacacactagaagttttttattctctgagttttattctcatatttttaaacctgaacacttgaaaagatttagtagtaagctaagctaatgcattaattttttttaaaaaaacaatcatatatgttattaacggttaacttgaaaaatgaagtttaagatgtatttggagtccttatcttctatataaaatctaaatggtacataacctgcccacttgggatatatattgttgttaattaatttaattatttgtaatatacttttaccactaactaacctgtaacctgataaaataatagccattatttaaaatgttatttcactcatgttattatatttatgaaagtaggcaaagcaaactaatttgctaagctcatttgagcactctttgcattttttataattattattaaacttattgccttttagtttgattagtttgcgaaccttgagtgcactgaaagaaagaataattttttttagaaatgggaatccactagatttgaagtacgtgtacaataaataaatatagaaccggatcctctcctacttctatagcagatttctttttccagatttcttttttttttttttttactatcgatcacatttttccttttccttaattagtgttatagtaactaattaacgaattgaatgagattttgtaggatagtgattgaagagaaattcggcaggagaggattccatttgtaatggcattttacatcactttgattggctacaaaatttcgttctgtaaatcaatggctgaaggaaaatttaagaaaaacgacgaaaatgtatgtccactagatggttgtagagccacaaactcaagcttgacacacacagaaaagatagaggaaattatattcatatatcctgtaaatttttaaattgtaattgatactttttttttttacattacatttaccccttttatgttaacattattaattaacgtctattaaaatgtgtaaataaataaaattatcctaatatctttgttatactcgtatctattatgtttttctcaaattgtacactatacacttcctttttttacattactttttgtccctcatctgttaacatcattaactaaggtcaattaaaatatgtgaatagataaaattgttctaatatatatctttattaaatactctataacattaacaattgatccagtgaatgaacatttcttaaggcaaaaacggtttttcctataatatttgactcttgcttgttgctaacacttgttcaagaagatgtaactcttgattgagacgttatatcaaatacctagtcattaaaaataaatatttcaaagaaagaagttaaaaacacaaatgcagaagcaaaacactaaaatttaaaacaaaagactatattcattcaataggcattgctgggaacatgtacaataaaaacgcagcaatcaaacgacttaacacgcaccaaaaaaattaaactaaaaaaaagaaggaaatgtgttaacacatctatatcaacaaagtgagtttatattcaataaaaagttggattcatgttgaactagagaaaaaataaaaagaaggaagagtgttaaaatattttcaagttgaaaatgatactatattttttatggagttaagagaaagaagatgagagtattttaaatgtaaattttcattaaaagttgtgtgatcagcatatgtttactttctcttaaattattaacctgtgttttggaaagtgagagcttggatataatgtgaactaaataattaaagaattttttgtaggatgaaaaaatgaaaagggtcgaacaactttgaaaaaacacagaaagtagaagtatagtttactagcaaagatatgttcgcaatatatatatcaaaatatatatgtagttttcaggaaaaaaaggccctaaattaaagaaaattaaaaggaaagtatcaaccacttctgttccatgaaggtgtacgaattgtcacgttagagcttgaattcaagaaaaataaagcctatgagattataaatagacaatcaaattaattagttcaaaattaaaaaaaaaggctaaaataataattttaacatgatagtaaataataagtttaaaacttatttcacatcttaaaaatttgttaatgtttttttaattttaaggattaacatgacagtgttcaccactttcaagtgaatgcttgataaaacatcatgtaggtcaactgaaaatgagaacatatcaattaatgcataaagttgaacaattttattggaagggtgagtgtgtcctttaaaaaagaaaggatagaaagcgaaaaatgtctttgattttaaccagttatatttaaacatactttatttttctgtcctctttagataaaatatattatttggccaatatgacaatttctattgttttgattattaaaacattttttatgtaaattatttttttaaaaataagatggttttttgaactgtcatcgaaagttaaaaatttttaagacattaacttcaaagacaatttaaatccgtttttaaatatcatatgtcatttttgcagtcatgtttgcacaaatttatgcttttaggatcaaaataacacttgcaaactattctttttttaagaccaaatttatatcaatccttttcaaattggattcatagccatctttgtctttggaattaatttattttgagttttaattcctatacatcaaaagtttagttttaagtctctattgtttaaaaaaaatctctgaatttaattcttgtcaacataccaaaatatgtaccttataatcaattggacaaatgttatattagaagcaccaaaatataaaataggacaaaataataagaactacaatcaaaatgaaataaaattgaggattgaaacctatagttgtaaaactataagaatcacaaggaacaaagctaaaattacaatgtgtttaaaccaaaaacataagtggacttgaaacgacattacttgggtggaccagtattcaaatggtccagaatgaccatacggtttgacctgatacaataagttgtgttggtaactattttattttatattatatgaaatgaatatttgaataagtggaaatgaccttttacccttaattaagttgtgacggcttcacaaccaccccaatgcaccgccgctaaggcaccaacacaacagatctctgatctctctatgcaatgaccgatgtaaaacctgcaactagcgcaatgaatacaaacaacagtatgctctttttcgcgatccatttttgaagacggaacttcctcaccgttaacagtgtcaagtttaactaaagggcaaaggagtaatatcaatcaatgtcatctaaaaagaattcaaaaactaaatggactttaaactgttacaaattgttacaagaaacaaatcttgatcattcaatactatactaataaatcggacgaacgttaaaagatagtccaaaatggataaattaatggtccaccgtagccttgatgggttgagaaggagagaatataggctcaatgggtgacgaataagatattttgcctaaggacaaaactgcagagatataagactgggtagagtatataataagcgaaaaattcaaacctagtataaaatggccatttttagtttaaggactgtttttattttattgtaaaggatatatattatcgaaatttaaggatgatatttttagtttttttttcttgcagattttccattttcattttattttggttaaaaataataaaggctaaaccatcttagatttgaatccagccattaggaaatatttaaaattaaaccctaaacctaaagttatatacgcattataagagtgaactacctataaaactacgtatacaaatgaggaaaggaaaactttaaattactactatacttgaaatttttattcattcatgctaagggagataacattagcgaaatgtggggcataatgtattgtgtaacctaacatcacttataacccattgatactaacttggggactactcttaagaagtatgcttaaggtaaatgatcgagcctaataatgattatgcaatcaacaatctgaaaggttgctcccgtgccatttagctgaacattgacagcttttcttaaagtgtcattgctcactagctgtgcttgccccatctagttgatatgctgcaaaaagatcaagttttcaatcctcactaatctaatctaattaaaggataaaagtaataatctcaattgtgaaagatgcaagcctcaatattagaggtaacttttggcctccaaaaacaatggtatgcaattctaacaaccatgaatgcaccattgcactggctgctccacaggatctgagatgtagatccaaggatgcaatatatacaccatcccccttcccaacatttcactttcttccttcattcacaaccgtctttgccccttttttctgatgtcaaaatcaatttatgataaaatagaaaaatgaaaaagttagatcaatcaaaagaaatggagaacctcctataagcttctattgtgttaatcatcccactaaagagacatgaatacaataacataagtagtagcaaattacaaaactaacatgcaaaagtagcaaatttcttatcactcaatttacctaactaaaacaacacaacattatgcatgacaatatgcaaaactaacatattttggtgtggtctactacttgaattatgcataacaatattgtgtttcacggtgtttctttttatttcaatggtacaacagaccttgtgaaggttagatccatatgataaagttttaactctacattttagagtaaaagtctatcctactttgagattgaaatgtgtttagtttaaagtttttattttagtaatttaattataggtaggttggatttgagtttggtctgatcccaaactccaaactgatcacccaatccaatttcggtcgaatttattaaattaaaaataattcactcaaatctcaaatcaaactcatataaatctaattgaattagattgaatcaaactaatggtattcatctccttacaccttgatgaaagggagagagtgtatagataaaataagcatggaattatggaattgcacgtcaggtgtaaggaaaacaaattgtagctgaaattatatggttgcaaaatgcgaggggtcatccacttactcttgtaggctctcaaaccttacaaaatactgccgtttattttatagtaattattgtgtagtatttttttttcttcggccaaatttcttctattatatcagattgggcctagtgtgttaccgaaaaaataattgggcctagtgacggatgcatattgatattttgattacatggatgcaagtccatttttgcatcaccgtaactatatttgcaattatgagtatgagtatgtgaatattataaaggaaataacataatattaaattataaaaataattttatatatgaacattcatttttttctagacaaaactggattgtaaaattttatattagaattatagtttttatgttgttcttcaattagaattatagttttattttagtaaactgcataataaaagtttattaaaaatgaatatgttattgaagtaaaaattcattcattagtggagaataacattaaaagcacttaaaaaccgtatttaaattttgtcttttttctaccattaaaagcacttaaaaactgtatttaattgctcacgacaatttcaaaattactcaaaaaaaagtgtcaaaaaagaaattcaatgggttcctaagctactccaaagagtgtttaatgtccaattgtgaatgagagtttgatctggcgtgaaagtaaaagataaaagctgtaaaaaaagtgatagaaaataaaatgataaagatatataaatgcagagtgaaactagatgtgtttgatagattggattgtagtccttgtaaaattcagtacaagatctatttatacagcaaggaacttagatacttcctgtaccacatttttctactcaataactacctaaatcgtggtttggacctttgttagttgattttacaatgattcgactaatcctgacaattttatttgactataatttatgcgaattcaactaattttactcgtctgatcatctaataaccctcttgaaccacatctcttgatttttgggcatgatgtccacttcctcttataatgcttacgtagtcgaatacctttcccttaattgatactcaggtctatttgagtaagctgatcgactattgtactaaaataggttattttctaaaactaattactaaaatgtgttttataaaattatttatctattatggataattttttctacgtaaaatagaggaggtaccaccttgagtgtcaccttatattttttgtttatcctatagcatgtagtaagaggtgtcatcctaatacgcttggacaacactaaattaagagaacatatgatatgagatccaatcattaaacatatatttaatgttggtctaaatacttgatgagaatagaatatatcaaggtggtacttcttgttagaagacaaacaaaaaatacaagatgaggcctcctatatcttacttgacaaaaattatccatgataggtaaataatttcgtaaaacacttaaagtaattagtttcgtgaaataaccgattttgatataaaaaaaaaagtcaagtttatctataaacacttctaggagaaagaaagaagaaaaaaagtaaaatgatttttttataggttaaaattaacttatgcataaactaatttgtaaaaattctcatatataatttctttaaaaaaaaataagagagcttctactaaattaatggtcttcctttattgaccaagttcgctcatcatgcagctattttagctaaatgccaacatcttctttaccaaaaagcacatcaaattattgctcttgctttgtggctttgtaacaaaattatgattttgatgcgaaagcaattacactttaaactaatcaaatatgattgatacaaaatccgaagcacgtttaaaggctcaaatttgatcgtacatgttaaaaagggctaatcaaaatgctgttagttacggtttgcaaatgaaagatgtctaagagcattttaaaggatcattattgtgtgaatgggctgtgttctgggtcattaattatcaggcactactattatatgaatagggtttctttttaaaagggtggtgactctcattgggttttagtttcaactgagaatttttatgaggatgccttagtttttgtgacatccacaatatctttctattgctttttagcgtcacgatatatcccaactgctttttcagtgtagaaagaatgtcgcaaaatattgaatttgggacacttgtcccatcaacgaaagatagaattgtgcagtcccggccacagattcatgatcaaattggcaatgaagtgtttgcattacctaacgtgttttcagtgagtctaatccaaatctgtttttgtaatatcacatgctggaatattcttatttttgttaagtttcaatccaaatacattcactaaagaaaatcatttaccaacaatcataaattattaagcaccaagagtaagtttaatagcataatttttatgtagcagaaatcaaattgccaatataattaagttttttaaaacataaattatgtgaccttttctttaagtgatcctgtaattttataaaacttgtaattttaatcatttatgtactgattgcacagtttgtgtttgcttctcccactctcataaacccccctaccaatggagggttggatctaccaaaatgacttatccccacgatgtaaaaagatgcgattcaaatatttatcaggagaaatgctcatatttaattttcggccctatttttatgatatatatatatatatatatatatcacaagaaattagtgtgggagaagaattaattttatatttacaaacttgtctattaatatgacattatattattaagataaacctattatgtttacacaaaatataatttttattcaaaaataatatatctaggtacattaatttaactttctgcaattagtatatgacaagtttaagacaaaacttacacttattttttcagctacattttgtattactctcttatcaaaactaaaattttattttaataatttacattaatttttattataagcctttattacataaattaccaaaagaataaccaattattgtttcataagctaagtaaatgttttaattatagaaattgagcacaagtagtgcaaaagtgtgtgatacatatggaccaaacgtaataaaggcaacactagttaagaacaccttctaaggggtgcaaaattatataagtaaacctcccccaccgaatacaatcgccactgatgtgaagataaaagaaaatcagaggagattatggctaagctccatagcagaaataatatccaattatgttaacattacatgcaccaaacgacttgcaatgttgcacaaattaagttttgtccttttcttttaatagtcttgtggatgacacaaaagtatgacaatatcgtcattattgttgagtgacttgtctgtggtctaggcaagtatcacagtgaccgcatacacttaggtgcttttgtcttttgaagagcgaaactgtgcaacatcaagggaaaagggaagccctacggttggaaaataatttaaatttccaatttcaaatattcagaatattttttagattaaaaaaatattgccttatttatagaatattgtttataattaaaaacatattttataaattagagatttatttcttgttatcagattatgctgttagatttatgtatagaaattcttaagataagaagaatcatttaaaaaatttgtctaatttgtattaaaaaaatttgttgggaggaaattgtgaatataggaataaaagtctgaacgaaattaaacaaattgagattgaagttctggatgtaaggatgaaagttcgaactacattaaataaatttatatttttttttattttacttgtgatattaattgtatgatttttaagtaataaaaattatatatatattttttcaacacctactaagatattctagctagtttctttcctcttaggtaacactagttggataggatcttattggacagagaggttttagcaataaacatttgcaccgcagtctaataaatttaagtatgtgtttttgttgttttaaaaaagatttgagtcctgagtactttctattggcatgaagagattttgtcacttcaaaatacaaaagtatgtgctcaatatgaaattgaattcaaacatttcctaaatttagtttaattaggttaaattaatgtgtagatttttggaaaaaaaatcaaaattttaattggtatttaacctttttttcttttaattaattgaattcctgaacttatatttggttttgtttattttaattagatccctatcaaacctaataaaaaataatacatgttcagaaactcaattgaaacaaaaaataaataaaaattcatagacctatttaaaattgacaaatagttcagggactgtctgctgttggatccctgttagatataattaaaaaaaaattaataaatgcaaactcggggacttaattaaaaaaatttaagaacttaattaaaaatttggaaaaaattcaagcacatgcggagtaattaacccttcagtttactatcacttaagatgagtttatatgcttattcattttacatatttttcatttataaaaataggtattgcaattaagaaaattgagactatttgcagataaaatatatgtttcatgttaattatagattacatatatttttaatctcaataaagatatgtaattattttaatttaaatttttaaattcttttattttatttttttgtaaattttcaaattttaaaaggtagactttattgttgttaatgatgtggcatatatataaaagtataatatcagatgttaatctataataattactaatgtaaaaaagcttatatatatcacattattattaaataatattagaaattattctaaaatgtacgagcattgaaattaacaaattgcttttaaagaactaaaagtaaattaaaaaagttaaaaacgtatttaaattataaatacattataaaaatgttgcaaaagaaatttaaaaagtaataaattttgttgttgaacttgatatatcacagcacttgctaatgacagctttccgaccggtttatgtgggaaccgcgtgtacgactatgattatgtcagcttatgcttcacaaaacaatcgccactcgccaatattttattcaaaattaataaagtactcctaacacatgcaaattctaatttttaattaatacttttttcatcatcttttataagaaaaaacatcacacttattaaaaaaaataattaatttcattaatttatgctatttttaattaaaaataaatatttttaatattatttttctttaaaacttgatactccttattataactcatagttttaaaaaattgatggtgcttttataaggtattttgaaatttgaaacatttatttatttccattggttatccttattgaatattgtaaatatttatgtttttttattaacaacaatgtataatattctttaattttaatattttcacgtcatttataataagttaatgattattaataatgatattcttggtacattaataacattttaaaaaaaaaaatcataaaatcaaatgcattaattatttttattggtctgcaattaatgtccaaaatgttttataataaggaccaaagcaaatattaaacatatggtattcttagtacattagttaaagaactaaaaaatatattttttgcaaatataataggagagcctaaaaaatcatgaacaaaatttttttacacatcctaataaaaataattttcctttctgatgagacactaattaacatttatcttaaatataaactctttattaaatgattgatatttaataacattatctcatcaaatgaaacaagagtaatcaaattttacttagaaagagaacaacttttcttttgattttttcatatgaaaaagaagggagggagtgcttcttctttcatgtcatcaaataattaggagaatgttttacttgattcaaaagaaaattaaattaggtgtcatcgtattaatttttaaggtatttttattattaaattaaatcttatcatgttttttttatagatttgaatcattaagttatttctttaaaaatttaaaagttctaaatttatttttataaaaaatttagtttttacaaaaaaaaaagaagataatactttagatattgtttttaaataagcgtttataaaggtaaaatcaattattttttttctagaaattaaaattaagttatgcataaattgaattatagaagttagatatctcatttaatttatctaaaatatgattctaactcatggatatatgataactgctaaataattatactttgataataaaaaataaagtaaaattatctttaaaaataattatttagcagttatttgtgcttaaatattaaagaattgatgtttcgttgaattttggttacagatataaaaattggaggtactaaaagcaaaaagtgaaaaataacgaagaagataaaaagaagaaatcagaaaaggctcagcctagtgtttcactaagcgcgcgtaacacaacagcactcgctaagcgggaggagttcactaagcgcgcgattcagtttgcgctgagcaaggaaggacgcgctaagcgagcctactaaggtccaaagctcacttcgacaactataaatagagagtcaggccaagagaaaatgacacaccgagtctcagagtaccctcactactacctaaagtcagagaactcctactctcttttttcttttgtatccattctttctttcaaccctctcattgtaaagccctcatggccataagtgactaatctcctagttagggcctgacaagcctaaaaagggtgtatttcagatttatcaatgcaaaaggattcctttccaagtttttctattctatgatcttttctattttatcttgcagtttcatccttaaattcttttgggagttagatgctcgggagataataacttctaataagatttaaagaaaagatgcagacattaattttagaagttagatgctcgagagagtgtaacttctaatagaacaataaaaaaaaagatatcataagaaaatcattgctagacatagaatggtaactttatgcccatgcatttagcaaacatctagaatttattcttcatgcattttatttattgagtcttttcaaagaaagttgggagatggtaaataaaataggcttgtcatcgtgagacatcaggggcaagtaaatggatagatgtgggtagaataaatccaattaagttgataaagaaaaatcataaattcatacatcctagacaaacaagacatgttaggtcttaacatttgcatttaattgaattttctctttaattattctgctcttaattatttttctttttattatttataattcactattattgcctcctattctttcttctaatcttttcttttattattttcgccttataaattgaaaagtatctaagataagtacaaaccaaaatcccagtgaaattcgacactcaaacttttgagactttattacttggacatttggtacactttgtcaaacgcctaacaatatactaattttaactctaaagaaaaacttagctcattttatcattttgtttttattttattttataaaagataagatgacatctaaaaattaactaatgattgattcatgaatagttaatgttaacatatgaagaaacttattttatttttttattcttattttattatagtaaaagtatttataaattcttttatccaaataggtccaatacttgtttatattttcaaatggaattatcataacatactatccagtcttaaaagactaatttaacaaccaaaattaaaaatgtaatgacgtgtcactgactagatgaacaaataaaaacccttactcaaattttttatgtgaaattaaattaaagtgagaagaaatgttgttttcatctctagttgccacttgttattatgatctcatagtcgttgataatggcagtgcatgatgtattgtaaacttggaaaccacttttgttttgagaacttcatggtattcaaatcttcctacattaattgtcttctatatatttgtatctatatgtaacatgcatattggagtccaagtaatgtaaaagatgcaaagaaaagtgaaagtgcgtgatatatacttgtagaatatacaaaacatttcattatactaattcttcagtatcttaaatattttcagactctttggtaaataaaataaaattaggtagtaagattgtctgcatatatagaagattataaatttatactgacaatataatatattatattgataataaaattaatgataacatatattaatgttttacatcaacttacttataagttaatctgatatatcttatattattattattataaatatcattaaatatatgagtttgtataaaatcgtgatattaatttttgaatacaaaataatgtactatacattttacataaatggcatctttagctctccattataggtaattatttataaacactgtctacactagttaaatataaatatctatttgtaagaagaaataaatatacatctcaaagagatagataagaagataaaagagaatataaaataagatgattgatgtgtgatgtaaaaagataaagaaaattgtttatgaataatataattcaataacatatacatgtgtttctcctttgaaatagatatattcccgtgaacacttaaaaaacattttgggattatactggtatgatcaaactgatctgaaattttaagctttaacatgtatgagtgtatggattgtccatcttgataaggtatgtgacatggggactattgtctacaataaggataagaacaaacaattttttctttccatttttaaatattggacaggacaggatcatgcaattcatgcccttgctctctccccttagggtcaatcatgcctttcttttcgtgatttaaacattaaaacaatttaaatatacatagatacataaaaatgttcatgtttttagattcatccaaaaacttctacagttttacacgagcaccgtgacaatatagctgtgaataagttgctttatccattttctcattgatcttttatttatcaagagtgattatgtgattcgttaagtttacttataccttatgagagtttttgatagacaaaaagttttttcatacatgagaattatgattttaaaaaaactcacgttattaataatcatgatttttggagttgtataaaatatttttggttagtcttatatcttttttggaaaataaatattcttacatttggttagattataacttttttggggtatataagaattttttacaaatatacccttcattcacaaaatgcatcacgatgattgaatcattttcttaataacttcaatatttcttttatagctttgtattcataggatgacattatggaagccaatgattgaatgttatcatcaaaattggtatggaaaaagaaaaaaacacacaagtaatatatatcatgtaatgcttagcaaggacaataatgtcaaaatataccactactcaatgatgaagatgaaagacattgtaagtctagaaggagtaatatagtgtaacaatagtggagaccggggtttttggataaacagcaatccttacagatgataatttataattataaacaagataatgtagtcattttgtgtaattaaagttttttcttcactcggaaaacttgaattctcacccctcccctaaggatgtttttactaaaatattgattgaaatttattctcaagaatcataagtttctggaaatatttatttttattaattacatactaccccatgtgagaatcataatttcctaatataggattcctgaaaaaaaaaacttttctactgccaaatgtctcctaaatattttgctctaagatagtaattcagtttttgtacacatgactttcacaagtagaactcgataatagctagatgtatctaaattcatgagataaatatttttttgtccttctaatatatcaactttttttttaatttctataaataattaggttttatgatttcgtaatttttaacttttcatttttaggttttttttatcaatcttcattatgaaaatgttaacatgtctccatttgacctagttatataagcattttggtaaggtgatgggtcgcatgttaatgccaaaaaatcacgtgtttctttaacagaaaaaagtaaaaattaggtattacaagaatcataaataaaaaatttaaataagattgcatttttgtttatctaaaatacattttacttcacaacgcaactgattttaaatttcagatcaaggcaaattattatatactttacttggttaattttatttattttttgtttaaagcacaagtattcttcactagaagtaattttatttgagcaaggaagaattagtataagtgacaaagccttccctccaagtattttccacttgattaatttttttattaccaataatatttccatattaatatcctactaggattagtttagtagttgaatagtttgcattttgttatctcactggtgtaaaatttgattaagttatagaaacgaatttagatttacttgtttagaaacgaataaaagaattccttcaaaaacaagtagaataggatttttttttattagaaaacttaattatgcaattgaaataacttattttaattggaattgttcatttcaataatttcattcacgcatgcgagattgaaaagcgctgaagagcaaattatttttcgacaaatcgaagtaccagttagcatggttgtaaagaagttatgcaaagacaattaccaatattagatcattgtatataagagtgtttttgtacacatgttaaaatcatgtagttcgatcattagtatattaagtttataaatagaattgttgacggtcaatttcgagaggttgatacacaatcaattaattcctcaaaataccaacacacttgccttagaaattgacaaaaattgagccggtcattgtgtgtgtatccaattctcaacttttatgaattcatatttgtttattttaatatacatttctaaacccttgacttttttcaatctttatttcttttcaaaattttactttttcaatccttattttttagtattatcgaaattatttacaaattaattattgaatcgaaaacacttttatcaaaagctatgttatcttatgaattataatcttattataactaaaatttatatatctatcaaaattattattgtaatttgcattaaatactaaaaaattatttattaagctgaaaactatgaacttatttgtttaaccaaaaagaactcatagttgaaaatagattttatgtctcattgaaacatttatttattaatagaatgattcaataaaaattcatttatcttaaaaatattttcctttcaatacaattttcatgattaacatattcttattttcaaactttgttgttagcattgtataaacaaaaaggtttccattatagtattataatctttttaaattttaatatttatagtatttttaaaagttaacaaaatattattattttttcatcattttattaaatttgtttaaaattaatatagtttccatgatattattaatgaccactcacgctattactaatattcggaaacatatagatgcagtcatgtagatagactgctcaagccgataaaattattgctataaattaagtacaaatgttcatctcgcttttgtttttaaggaattatctaaaacaattatatattataacataaaacttagccaataattggtttttgatgcatttttgtttgaaaagagttctaagtgccttgctatttgatatgacttagtgcactagagtatagggatcatgaatatcaattctctttatttttatagaaatcattatgtctttaataaaattaaattatcactctttacattatcttctgtatttagtttgtatatataatttgagggtagatatagtgtagttgattcaattatttgaaggaattcggataagattttaatataggacagaacttcattttaataatctttactttattttagaaactaaaatctacggtaattactgagataaaatattgaatttgattaaaaaacaacacgaacagtatatagttatacatagtgctgtatgtatccaagtttcgtggtttactgtgtatacaacaagtgcatggaattgtatatattccactatggtaatccctctatatggtcttgactttgcttctgtttcatttattcaaaaaattaaagtgggaaaactaagagtcactatctgctaaaacaagttgtagattcatgtgggtggttcgtacctgtatgaatatgatggagctagctagtgcaaaagcaataattgcagcactctacctagccagagtctgaaaaaacaaaagagaaaaagggaaaggaggcagggaaggcaaagaaaacgacacaaaaattatgggcatgtggcttagggtaaggtcctaggctatgattggtttccattggaatatgggtgcaaggtgttagttcccgaaacttacatgcattattgtcatttgttaaggtttcccttcgttaatggaaacgaatgaacattatcaaggtttaaagcaacttggtcatgtcgtttcccctgaataacacaacatacttggagtatcattgctatcaagttggcccctttgcaaaccaatatccaaatggggattgtctatgccccccaatgtcaatctaccaccagacccaccaacaaataatgcatgatacagacatgcaaggagcaatgcttgatatataatcttgtagtgctgatcaaaataagaggatggaactgtcattgtcttaattgtgccacaccctctctcaatgaactatagtttttgggtgaattcggaatatttctcggtagaaagccaataatttatccatcaaaatacaaagatctattcaaggaactgatcatgttgaacgtgtgttttttcatatgtatgaacttaatgataaaacctcattacatgtttaaggattatagttatctgacaactatattataccatattatttaacgaactattgatgttgcgaattgctaagatccaaatttgaagagcatgtcaatttcatgggattttgctcactaattatccctacttgctatctgcatgatactatgacaactacaccatcatgttagttgcctctacaaatggacctgaatgttgtgccaccctgtgtccctcttctccacccaatatcctttgtcctgttgtgaggaatgtgagatttcggcaggtttggaattcagcataagtttgagaattttcaggaccaataggaacttggatattagactgtgtgagaatctaattataagcttcaggaaaaaaaaatgaacatttagggtttttcatcagttgacacgtggaccacaagattgagacgctaaaacgcaactgcaaatatgatgagttgttgcatttttggaacaattacaaacacccacccgcattctttgggatatgaattttgtaaagataatttggggatcaatacaaaagataagtctatgaacaagtgctagtggaagcatgataaaaaaatggggagttgacggattgaaagggattttattacttgtagggaacaaactaataattaaaaaaggttgatcatcacaagagttattcaattgatgatgtgaggtttaatagttccaaggttgggttaattatttctatttattaagtctaatcctctagaaaccactatattggaccaaggattagatgcggctcacctgtccttaatcgagcgaatgtttgcacaagagaacatgcacactcatcgagcaaaaaactctcaaatgcatgacatgatgcgaccaagggagttacgctatttattgaatgtaatatttaaaattcactatattgtgtccaaggatcaaaaaatgttcattcattttcaattaaacgatccataatccctagtattaaacctaaatgacatatgatgctccacaacattcacattagaaaacacatacactaagtggtaagttgtcctaagtgtgacctgatcaaagaagtaacacttatttattgagtgtgtcgtctaaaaaccaatattttggacccaaggactagaagcttagatgtcttgatcttgatctgacatgattatttatgcttaaaccacccaattgtttttgttccattggtgcaatccactgaaattagcgtttgtgttttttgcccaaaattggtattggtacttaatggaaggtgtgtaaatgaatcattaaagttattaacatagaataattttattttatgtcaaatcaaaaaattagaatgaaacggaatcaaaaattacaagaaaaataaggtagtgcatattttatataccaataagaattgtggccaatttatttcgagggattgacgaaggagtagcaaaggatttttgtgagggatttgcgaaggatcattgcgaggaatagacaagggaaaagagagagttgttagcaagggattgaagagggtatagtgaaggatcattatgagggattggcgaggaaatagaaaaggacttcagcaagagactaaagagaaattaatgattttttttgtgaaggattagcaattagcgaggcatatcgtgaaaggtaatagtgaaggatttgcaaaggaattgcgagaaaatatttttgactttttttattattcgctaattaaacaacttaaattttaacaatagaatggtcctcagctccactaattctccgcgaacacaattagcgagggatttgtgagggaacatcccctcgctaatatgcaattttcttgcaattaattgaggtttgtccatgtttttttcttaataaattatgtatcaattcttctatataattatattttttaatcgtcctatcataactctggttgttgtaggttcaaaatatcaaggtcacgtgtctatatcaacaaagcaccatgctagcggttatcacagtcacatcaaggttgtaccctccattgttacacccaacaatttatttagaggaaagatatatatggatatctatgtataaaaaaatgaaaagtatttataggatatcatcaatattaggagagaagggaaaatatagatatgacggatgatataattctgtagaaagaaagaaatgaaaaaaaaaatattgataaaatataataatcttattaatcaatgttcttgaattattagtttaaaaagtaaaaaaagaaaaatatttattattaaatcacaagagaatataattttcctcatcgtataattttccttgtctttcaataaaaatacgtttactttaattttcttaatcaatattgttagtatattaattagaatttacnnnnnnnnnnnnnnnnnnnnnnnnnnnnnnnnnnnnnnnnnnnnnnnnnnnnnnnnnnnnnnnnnnnnnnnnnnnnnnnnnnnnnnnnnnnnnnnnnnnnttttatgaagtcttaagaaaaatttcttaaagtcatgactcatgaagatgtttcatgattcatcccagggatttgaaaagactagaagagagttatttcagactctcagttaagattgtaggttgaaagtattcatttactgcagaatgactttgtatatacgtttattacattgtatctatactattttgtcatcaactcatcatgcacatcttctttgacaagtttttttaatttacatatacactatcttgcaataaagagtatcattaacatattttctttttttaattgagacgtgtaacatactttttaacttactctttttaatatatattttattattaattaaaatttattaaaaattacaaaattaaaaaaaatcattaaatgatcagaagtaaaatatactaaaatttaagatttctaataagttttagtcaataataaaataataaaagaatatgttaaaaaaagtgttattagtaacatttctcatctgtaaggctgcttatatttttgcactttgaggtttttttttcaatgttacgtatgcatattatataaaatattcggactaagtgttaattaagcattaaatattataattttgttctagtacgtgagatagacagattgacttgactatgaataattttggaaattgctcattctttttatgagcacagtttaagagaaattgaggactaaattaaaggtgctgtgggtttcacattgcccgtttttaaggagtttgtaagcatggcttggtcttgtgtcaaatataggatgcagtaccaacgacttctttgaagtgatatgattgatagacatagtcgagtataacgtgttgattatgatttacgagttatacgcttttagaatcatacatattcacattgattgttttatatcattcagcactagagttgtttttagatatacatatatcctagagggaatagaaaatatgaaattctttccaccgtccacattttttaataaaaaatagaaagttaagattaatttaaatatgtattttaactatgcttagttgttaaaaattaatgctattaaaaataattttacctaattttaaaataacgataagttaagtgattgaaacatgtaattaatatgtaaaagttaaagttggatcattaagttaatatctaaatttcatttttgacaaaaataattatttatttattaaattttacttattttctgatcgaattaaattcttgacaaaaataattatttatgtaaataaattttattattgacttcaatagatgctttttttttccatgatgaaccaggggctaagacaaaaaaatacctgatcctaagaaaaaattctatttgaaatctcatttatttaattgtcaattacactttagttccatgtttatataataaaaatgtttttcttatacttttttctgtgtgttatccctacactatctcctcttatgatgaaaagaaaaaagataaactcaaatttaagttgcatttagtatgagaaaacatttttaattttaattataaaaaatgtcatgttattttatttttaaatttataaatatttattaacaaaacaatcatttttattattttaatgtgacaaatttgtctatttaattttaattataagaaataaaaataaaatgaaaaaacattttttttcaaaacaatcaggcaattgaatttcttcctcactctttttactataaaaagagagtgataagggatagtattaaaaaaagtgtcaaattataattttcctacattgaatctttataattctttagatatttcttaattctttttgtgtacctcagtgaaaagtataataaaaaacattttcagtataatattaattatatggcttaaattcttttaaattatccctatttttcttttttatgtttaacgcacagttgttgtcaaaaaataaatcatgcataaaaatatttaggataaatatatttttaatctcttagaatagattatttttcaccttggatccttcaaatttaaaatttagtacttatcttagtatatgatactatatatacatgatttaaaggaattggtttatattatttatactaataagatatatttattttttaataatttatcgtttaagtattttataattaagtatgtttaactttgtataattttaaaatatgattatctcannnnnnnnnnnnnnnnnnnnnnnnnnnnnnnnnnnnnnnnnnnnnnnnnnnnnnnnnnnnnnnnnnnnnnnnnnnnnnnnnnnnnnnnnnnnnnnnnnnncgaaagatcttaaaaaaataagtattttgttttataaaaactagctactatgattgataaaactttttttaaaaaaatatttgtattaataacatatatcaaagatttaaactcaagatcattaaagttgaaattactttttatatcaattgatttgttgttattgattaacattttcctattttaaaacactgtaaacctatttaaccctattacatgtcatggtaaaatatatgtccggtcgtacgcgtacatcattattaaaggttggctgcacgttaaatttcaaacaatctttataaaatgaagtccttcaaaattcggtttttctaccgataagggttttttttataaaaaaaaaaatgggttggttttaaataatttcctaaggaaggataaatcatgacagctgacaccacttttaagttaaacgtcgtaacacaatactttacatcttttaacttaagtcataaaattatttataactatatttaaattttgttttacgactttaaaattttaatcatttttttttgtttttatgactttaaatcataaaagtttttttttacaaatttgaagttgcacaacttttttttaaatataattatttaagtttaaagtttttttttataaattttttaatttttttaccgttattttattttgttttcaaattttttaaaattgtaaaaatttttatttatttaaatgtcaaataaataaatttaattttacttattaattgttttatttagtatgatatatatttttatggttttattttatatgttattaatttatttaatgttctactatttaaaatatattatatatttttaatattattttatttaaatatttttatttatttaacatttagatgatctattaataaaaattcatattatctaaattgtatgtcctgcttttatatattcatgattttagtatgtatttttattaatagattatctaaattttaaataaacaaaaatatttaaataaaataatattaaaaatatataatatattttaaataataaaaattaaaataaattaataacatgtgaaataaaaccttaaaaatatacatcatactaaataaaattattaataaataaaattaaaattatttatttgacatccaaataaatattatttttacaattttaaaaattagaaaaataataaccataaaaaaataaaacttttataaaaaaaaaatttaacttaaacaattttatttaaaaaaattataatttcaaagtcataaaataaaaaaaaatgatcttaaagttgtaaaagtaaaaaaaaaaaaaaatggatacaacttttatcgtcaataattttataacttcaaataaaaaaatacaaaattgtaataagtattataatttctaactcagaagttatattatacatgttatgatcttctttggagaaattatttaaaatccacccatctgaaaacatacaaaagaaacaaccccttacgataaaaaagcctgaaaatctccattgtcttagcatagtctcatatgatgtctttacttaattatacaaacaacattgaagtttgtcatgcagcgtagcaccattttttcaaaagctcaaacgacactgttctcatttaacgcatgctatcctagatttgctcagatggaaccgtagcttgcactgacaaaatctagcttgtacgttagttctttttagtttttatatttgaaaccagattctctccagctctgaggaaaaaaaaatactatatattaaattaaatatacgaattcaattaaaatctaatgtcttggacgttataaaattggaatttatgctcataaattgatttaatgatcttttataacaaaatttaagcacttaaatatattatttttatggccgggtttaatgtccatatatacattatttctatataaatttttatacaactaatagaacgatataaatatgaatattttattaatgcttttaaaatctagagacttttcatatattttttttatatcttaggaaaaggggtgactcttctaaaattttgaaatactatgcctcggtcgacctttcctttctttcttcacccctctaaattttcaaaccttcccaccttataatttgtttagtactatatccttgtcaaaattaaccattctctcctacccattaattattatgaaaggagacatatttctccattacgtgaatctaggctagattcaaacccctaatcatttcatagaacactttgaattctctgataggaaactgagccaatcttgaagggaaaacctacccaccacaccgactcatattctgttcattgtagtctggtgtttttgtgacatgaaatcctctaactcggtctatattcatcattttgttcctttgtaatctttggctgatacccatagaagagctagtctaactgcctctactctcatattggatacgattttcctccttgtttttttgtacgtagccatattgcaattggttccccccaaaagctgccccttgatagaacttttgtcacaacatgcatatatatagctgatccaatgtcaattaattgcaagtacttctatgtttttaatgtacccatttttttatattaattttcttcccccactttaactttttaccctctttttcaagaattagtttcgtgatcctgaattcattcaataattcctagatattttattgacattctaaggtgatggacaaaaaatgggcatgaaaatggtaatcgaccggaaactagaaacatagcatggtggacaaaacttttgtagttactcgtgcttttgcctttcataatttgcatcaactttttaatattgtttcccgtaaagtggttgaagggactttcacaaacttatgacggtgtagtcgtggagatgagtggccagacacttaaactatgttcgtaaatgagataatatgttattatatgcttttttgtttaggttatactctttacttatttaatgccaagtgaaaagagtcaattttcttttatattgtttaaatgtagcttgaagaatacctaaagtgtatttgtatagaactcatcccttctatgataagtcaagcatgtaaaatgaagtattccgtccagtttcttttgtaagaaaaaaaaatcttattttttttaaatataagtaaaaattgagtaattttatcttatttacgaaaatcattttcaaaatatagttaatttaatatatatatatatatatatatatatatataaaattatgtttgatattaaattttaatagaatttattttaaaattaacctaatttaatgaaatcaaccaatttcttaataaatgtgagactcgtccttcgttctcagcaagaaaagccgaaattccaaaacgggaaacgcttttctggctaaaggacaaataccatagaatttggagcattacataaataattaggaaattcgaattaaaaaaatacaaagtaactatttttagctttaaaatgtcaatatatgtgatggtgtgtttggtaggaaaaaaatttaattgtatacttaatcactcaacttttatcattttacgatttaccaatcaacttttttattcacctattttatcatatttcaacaaattttatcacccaatgacaatacactgtaaaaaattatagaaaaataaaatgttatctctttcttatcaacaatgataatttgtaaaaactgaaaacttaaatgataaaaaacatgaaaaaaaacttgagtgatacaatatataaaaatcgaatatttaaacgataaaattcaataaattatgataatcggatgataaaatgtacaattgaaaaaaaataaaaataaggtgaatagaaataaattaaaaaaatagagtaaatgaaaatatgtgagaaatatcataaaaataagaagtatagtttaagagaaataagagagaaataaaaaaaacaaaagaatattttaaaatcaatttttatgttaaattcttcacaatcaattattttggaaaacaacttatttcacgtgtgaaaaatgttgacaatcgataatcaattattagtaatggaaacacgattatgacaatgcactgatttttatttttttttgagtccgcgctgatttgctgaggaataaaaagacgtgggatgtatacctttttatttctccccttccccatatttactctaccaaacacctttttttttttaatttccacttcatttattttttctggatgataacaaagttttagtagttcatttattttttaaatacataaacatgtaactaatttttaaataatgttgactatacgacaaagtttagttcattttggattggattagtttacaatattaagaactaaaatccaatattataaaaaaatggtttctcaatttcattcattttttattttttatttttttaattaatgtgatttgtgttggattgggtcaattgaaaaacacctctattacgtaaaagaaatattacttgtataataaattttacaattaagagagaaaaatatgaaatatgattaagaatgtaataaaaataaattgaaatacaaaatattcttttataaattattatatgaatttttgtatgaataacacatttcctgacttaagaagagtttcgttttagtaatatttcagtgaaacatataaaattgattatatattaaggatgcaaatcaagccggaaaacttgcttttctgtaagaagtatattggccagatgatagaattttctacttttacattttttatatataatattgttaatgatatataataaattttggattttttttggatgttttaaaaataaaaagttgtaagtgtttaaaaataatttaacactaaaattataaatactaaaaaatatatttttctcaagaaaatcaaattaataaaaatattacataaatatgtctttttatgtaagcttacatttttaattattaggtaattttatcaaacacttattatttaatatgataactttgtaacttttaatttgttaatttttaagtttctaattaccttttcagtttccaattagttttcaggtaatttttttatcttaacatttgtttttgtttaatggaatcatatcattacttcaaaaaagtattaaatatatcttattaaattttctttattatttataaaataaaaagtaattgaatgatttttttatctaaataataaatatttatttgataatatatttttatgtttttaatcaataaccatacaaaggcatacaatgagaattgttcttattttaagaatgcaagaattataaatttaggtcatacaattattgataaataatcaaatttttattttttttatttcttaaaaaattagttaatagtcacatgactaattaaacatgatctaatttaattattttttataataactaagagttctcacatgaaatgttttctactcataggtgtatattacataaagataaaactaaaataattggtttatttgctaaaaaaacattatattggataggataattataattgtttaaggtttgatttgaaaaagaaaaaaaaaatacatgaaacaatacaacttacatggagatggaccatataaaatttttaaattttgtttatcaatatatcttaagataatattttttatcttgagtacaaaatatgtatctatatctatctccatcaaacaaaacactagataaaaaaaattatcttataacttaagtatttatcatgtgttcttgatgagtatagattgttagcatttctctctcgcactctttcaagattgtaaaatcatgttataaaaatgtgtaaaaatatgaacatattatccacttttttctttgtttttaactaagtcatgtcacaaacattgtttttgagatattaattcttaactctaacagtgtggtgattataaaactcttttagagtgtgtttagatcaagaaatttaaaattctgagaaatttaaaattctaagaatttcaaatacttcaattgaaattcttttattttcaaaattttgtgtttcgataaaaaaagttaaaattatgaggatgaaaaaaaaaatatgattggtgtgctagttatacgtgttcctctacactcagatccgatcgatatttcacaatctcatgcagtgtttcttgaagaagactgtaagaagagaatttcaatttctcaccttttagaaggaaattgaaattccagatttttagttgtttaaaattctgttttaaaattccaaaattttaaattcttcacaaaaaaacatccaaataatgaattctaaattacagaaatttaaattatctgataaattacttttctgaattaaaattttctatctaaacatactcttaaaattttttttcttcggattttgaacttttgacttccacatagacgtggggttccatttccaaggccatccatgttggtaatttaatttgcatgccatgagtttagacatgacaaggcgaagtggggaggagtattgtctttctaatctttgacccttgcttctcaatatatactcatatccattctcgatatcccacatgttaagatttattatcttatttttataccgatccggtataagatatcttcgtctccaatttagatttgtaattttttttgttaaaaaattatattaaaaatattatttaaaataaaattgattgttacacatttatttttaattacttgtatttgtagagtatttatctacaaaaattatcaaaaaaacaataacaagtaattaataaaattttaataatatcttcatttccgacaccaaccccgattaaaaaagtcaaataatttttaaattcgtatccgatcaacttagatatttttcatcaaaatcgaaacgaatttatacatatacccacgagtttcattgtcatgagtacattagttagttgtgtgtaaagggcagagagagagagagagtccctgtgcctatataatgccccagtcattctgatttccccaataagcggccttggctcttctttcaccctctctctctcgctcagtttctctgttttcctctgcttctctcaaaacacaccttttattattattattttactgctataaactaattttgcattgttaatacaatggccatagagtgcataacaaatatacaatctatgtctcaaccacaaaagcatcaccaagaccacaaagaagatgaagcaccattggtttttgatgcctcacttctcaggcacgaactcaacctaccaaagcagttcatttggccagatgaggagaagccatgcatgaatgtgcctgaacttgctgtccctctcattgacttgggagggtttatctctggtgaccctgttgcgacaatggaggctgcaaggatggttggtgaggcatgccaaaagcatggtttctttcttgtggtgaaccatgggattgatgccaagttaatctctcatgctcatagctacatggatgacttctttgagattcccctgtctcagaaacagagggcgcagagaaaaacaggggaacactgtggttatgctagtagcttcacgggcaggttctcttcaagcttccatggaaagagacactttcttttcagtactcagctgaggaaaactcatccactattgtcaaagactacttgtgcaacacattggggaaggagtttgagcaatttgggtaagttggtaaccaaaacttgtcaacattattttttttcttctattcctccttgtttgatatcatttgctttgactctatgctaaattgtgtgtttctattggaaaacaggagggtttaccaggactattgtgatgccatgagtaatctttctttggggataatggaacttttgggaatgagtcttggagttggtaaagcatgttttagtgagttctttgaagagaataactcaataatgaggctcaattactatcctccttgtcaaaaacctgacctcactttgggcactggacctcactgtgacccaacatctttgaccattcttcaccaagaccaagtgggaggcctccaagtttttgttgacaatgagtggcattccgttagcccaaatttcaatgcttttgttgtcaacataggtgacaccttcatggtatgtttggtcttgtctttgaatgcacctatcttaatttggcaaacaatggtttttcctgtgtgatgttgtcattcttattcatccttgtttttgattatgtgtaggctctttcaaatgggaggtacaagagttgcttgcatagggcagtggtgaacagtaggaccacaagaaaatctcttgctttctttttgtgtccaaaaggtgataaggtagttagtccaccaagtgaattggtggatgatttgaccccaagggtctacccagattttacatggcctatgctgcttgagtttactcagaaacattatagagctgacatcaaaacccttgaggcattcaccaactggcttcttcaacggaaaacgaactgaaatgaaatttcaagcacatattattattagcctttggtaatctcctatgaatcaatagtagcaagtgtcaagtggaactagtgtgattgatggcggtgaaaagggcagcagcaaaaacgcactgagttggaaaaattgaaagaaaattcatgtttttttcatgatttgagtgttgcacgagtagtgattggagtagtataacaagggatataatatttataagggcgtcaatgagaaaaattcgccagctaattttgtaattttgttttggttatagaaaagttattgttaaactttcaatattttttattttttgcttaacgtgcataacgacatatgatatggtaaatccaagtaagtaaattttcttaaagggtttggaaccattaggaagagacactaatactgactttataacttaatggcccttaacttctctaagattcggagaaggacttgatactctgtctattcccagatactcccaatgtagatattgcactcactttctcttcattccttccatcaaatttttattagtgagtgatgctatttggtacgagtggcacgaaatgtagtatttaaggctgagatctttcttaaatagaatttagttaataaggttgataaaataaacagtgggatttcttacaaatcccaattcgtctcttttcacgaaagtttttctgtaacatctatcatttccctttttattatgtaatttgtataattaaataataataataataataataataataataataataataataataataataataataataatagtaatagtaacatttaattgtcttttattgataagattatatagaactttgtgcacctttatatacaggcttaaccttctcttatttatcaagggtgccaattaaatttttataattattctgctatatacttttatcccattattcgtttttgatgcatagaattgtagaaaagagaagcacaaatcacaagctaaattctagattctgcgtttattttgcatgatggattgaaattgaactagtaaatcatcttctctgtaaaaaattatgaaacagtttccataaatatttgttcaattgctcaataactgagattccgcattttggaagacctccttttgaattaatttccagaattattcaatgttttttcttttgtaaggtccaatatgactgattcgaagaaaacgaaggttaacacctaatggatccaaattggtacttaaattaataaaaacgatgctatatatgctactgctacggcataaggcacacaaccgataatctttgtttatcttgaaggtcttagaagttggaactatatgagagtaaggttaaaaaccagcaaatagatccaacaaaacatgtgacccacaatttgaatgattcggaggaatagtgagctaaaatccactgaagattggcatagatctcttttgcaatttatgcagtatatatattcattttcattttctgcaattgcaagctcttgtttttggttttattatcctgatttttcatacctggaaatttggagggttgtgtaatttagaaatgcaagggaatattcactataattctcccagcacctgtcttgagatgctgcaacattctcctcacattattttagtcattaccctttaaaaataaaatgaatgaattgagaatggtaaagcaaaacaaagatgatataagtaaagggatctctcgagttcgaatatgattactgtggctttgtttaattcaagttgtagtgtttgtaaaatttgttatcgtatcttttggctttctctgcttttctcacaaccaaacacggtcctagggtgcaatttgcagtttgtgcataaccaaaacccgttgggtcattggtttattttggtctaaaattaaaaaaagttatgtaatccaagtgataacattaaaatacttttagggaataaagtgataataaataattaaattgaggaagtaaaacacaacatagaaaaaaaaaacaatgatttatctatattttatcattgatttctggttagacaaattggtatgaaacaactttgataaagttgatcataagtctaggaaatgaattttacattaatatataattaaaatataataataatttttttttattaaaaattatatactatgataatcttcttctatttacaagatgacttatttattatgtgtaatattgggagaaattacaaatacaggaaaaaattaattttaaattattaattattattattataataatactaactatattattatatttaagttaaattactcgattgtctctaaactatttaaaaattatgaagtagatccctaaactaaaaaagaagaaatttaattgggtctctaaattaaaagcaaaaaagagtatgctcttgggatagtttatgacaacttgaaactgtaataaaaaaaatgccaatttatgatgattttctttttttctttttgtaactcaattaaaataatgcatgatcaagatctaattaaaaaaataattagtttggaaagttacttaaaaattccttaatagcttgtgaactaactgaataatttaattatatttaaaatgtgactttttatattttatgatatttaatagagaatatttgtaattaattttattttaaacttccaaattttattgaagtatttgattcattggcatcttcataccggtagatgacagttgaaatcttgagttgttcgaactatacatatgagagtgagacatccaagaatgtcaatatattctatcaaagatatatatcctttttatattttgatgctctcattccaaacaccaaacattcaagaaaatcacatattttgatgctctcattccaaacaccaaacattcaagaaaatgacatatcatactaaaaaaagaaaattatcttgaagcaaatttattctgaaattactttagagagagaagtgaatttacaagtgagtcctttgcactaaagaaaaaaaaaaacaaaaaattcattttttcctctcactagtgtgtgcttggtttttggttaggaaaaggcacagccgccacaagtaaggacaatgacagtcccattcccgtactctcttccaaaaggcccgcatcacgtggaaaccatatgttgtttgctctggcaatgcttctaatccaactctctgcattatatggttatgatttgataaaataaaactaaaaaaaaagagaaaaaaaaaacaccaaacttttgtgtatgcaacacaactttgctctcttgaaaagcgacaccgcttagggtttctgtcacagatacctcccctactcacctatccgtatatcattcttgttctctagttcttttcatagttcttttgttttcttcttcatgttctgctttctattttattttttttaaatgataacaatctatccacggattatgcactggattaagtttggatctcccaaggatcatcatattaattaatgacttatatggtatataatcatgttatgagaggagaagtataatcatctatgtaactgatatgttattagttcaagtaaaattgaattcaatcattttaagtaagatgttgttgatttgagtttgtgaatgaaaaaatatgattaaaaaaaagaataatactaaagttaatttgtcaaattcatctatgatagtctcttcctcaggcggaagtcatttttaatcaatgaatatccaatgataattcttagattataactgtaggtgtttcgacctggctaaccattgtcgctaacatgctctagtactttgcatcgacgcaatacctacgagacatgctatcctatacctacgagacatgctatcctgccttctatgtatgaactcactcatcatgaaaactttcgatatgagaaattttcttgtccatgtagtcatcaccaattcattaaactcgcttgagctagctaccaattcgaaccaatgactctaatattaattattgagaaatccaatagaaacaacgatgacatttaacaccattgaattttgaacaactacataacttacacttaactttccaatttctatcaaatgtacctcacactttaaataaaatatattccttgaattgactataagaaacaaagggcaggtctccaatcaccctcttaataagattaaatcgttaattacaattatcttcatgccaaatgagtatagggtatggtgttaagtcgagctaacagaatttgggtcatctagttgggttcgattgtggaacaattcgttcatagaaaagatgtaatcccgttgtaaagtattcctactaaagttagtggtctttttaaatctctaataaggacaaacctgctcctaatctaaatcctggttttaaaaaatggtaagtaaccactagtcatgcttctattttcattcgtaacctttgaagtggcacaaaaatggcaacgagtctcaatcttgtgttttagcctcagttttgcttccacacatcaatgcctttttctttttatatgtttatctcattaatagttttcattatctatagagaaggacaaattttgcttgttttcattggtatcgtgttcttatttgttggaagaagatagcacaccaaagaggaaaaaaaaaactaaatcaacattaacaactgtaatagacacaatttaaactcctccttgcaaaatggcaatctcaatctcattgaatctcaaaaaattatctttatctgctagctacctagagctctagggatactgcatttttgttgcagcagctgttgattgaaatatatgttttttgtcctgtctgataatttccattgcatgcaaacgacaacaattcaataatttttctattgccatctagctatagtaaataaaatgtagattttgagcacggaaaataggagtaccactgcaacctcctacccctgttgattgttgagattaataattatattttaatatgattagtagacacaacgagggatacaattatactttaataagccaacaacacttacaagattagctcactcttgcgttgctaagttggccatttgagcaccatttaggaccacgaaatgacaaaaaaagcatgatctgattcaagcttttgcccccaccaaaattaaatagttaaaagaggttttattaattttttacttgaaatctcattccataattacgtgccaggatgtccaagacacataacgctttaatcaaacacacaaaatcttatttcttctatggttttgtcgtttcttttgttagattgtgtggacggagactgaaatatgcagcaatgaaaagaaaagaggttaggatatatatattccaaagatatacatcgtgtgggtgagcttgcgagaatggcttccattcgttggttttgtttcttttcttgtttttttaagatgaatggaaattgactacacgaaaaagatagaagtacgattacctatcacatgttaagggaggaacttttgtagatatgcaagtatgaagtatctatacaaaatcgtaaagtatctaatctcgacatatatatttcatctcaattgggttttcttatttacctgctgctttttttatctaaagaaaaggaaatcaattatagtaagaacacaatagaaattctaacacgtcataaatattagaattattatcacatgtgtgtatatataacaattttcacacacgaaattgtttatgtaaacaagcaattcttttttattaaacgtatttcgattaattattagggttactcccatacgtgttgtttttatgttttgagttttgagatattagagacgatcaccacaccaaagccttgttctttaacaaatacacagtacacttcttgatataatttcataatttcgatacttcttcgatatcaaaacctcaaaagcagtattttttttttcacaggctccatgtgcaagtgatagatcaatcacttctagaagacaagaagtaataaactaattatgctgtgtttgtacagagaattgagtcagaatgacaaagttgtttggtgacacacgtgattcaacgccaataataaggcgaagtagatgataaggcccggcttcaaataaaacgaagttttagtttgtttcaaggcatgaaaattatattttctctgctgatattcaatgctgttttatcttcttgaaagggtgataaattagacacatggtttgtttgtgtattaattgatatcatcatgattgtgccatgtttaagatacttgttaaacgcattagagttcttaatcagtacgcagcttgactagtttagtttgtccgattttagaaaaacttatgtcacttacaattataataagtttttaattactcctaatttaaataatgcacttttgtttgtgggtgaagttgacaaagatataaaagttggaataacttttgaggatgcttggatcagtgcaaaattaaatgaacaatgcaagtaataaagcatgcttcacgtcttaatatcttaatcattttgagtgttgtttctcttttatgtaactacggcttttaacttacttccaagagttcttgcgtaatccttgaatgatatacctgttagagttggtttctttattgatggttttatcagccagctacacggcttgatatggaaaggaggataatgatgaattatagcatgaatcttgttgaacatacagtcatacacattcaactaaaggatttttttttttttagggaattcccatttgtgggggataaaatctgaaacaaattctatagaagttagtaatttaatttatggaggagtgaagctaactaataacgattataagtattatatatagtacatcatatatgtaataagtttattattttaaaattcgcatattactctattatatatgaaaataaagtgattcgttgaaaaattgactagtttgtaaattctaaaaacatttttaaattcagttagcttgattaacaaaactttcattgaattttccatactcatacgcaggtatgtgtgtaagccatatatatatatatatatatatatatatatatatatatagagagagagagagagagagagagagagagagagagagagccgtaatattgttataatctttaatataactttaattatataaaatataatattttggataaatttctaatattttttcttctgtttattgtataataaagaataatcaactactcgatcacatactatgaacaatgataaaatataataaaatgctagctattatttttatattcttcaatgtatatataatataaaaatttactatttattgagtttcattaaaaaaaaaatacgcattcattttccacgtgatgtcgtgattttcttcgcaatcattgatcattttacgtgcccagagaattacacagatccgaaaggataagaaaatatttaaaagatatctttgatttatgcacaatccaatgtacatctattggcatacttttgttcatctggagaaagacctttcttctgtcggtgaagaatactcaactttagtttcgttagattgatggctaaattataatttcaatccttttaagtataattttttttcctatccttctaagaaagtaaaaaagttatgtagccaagcgtacttcatactgaagcattctgacttcgttttgggtcaaatcaggcccaaaatcgaaacagctccgaggatagcccattatttttctattctatattaacacaatcattgtacggagttgctattggtcccattattagcttttgttattgatcgctataattcttcaaaatttcaagattatccattcttaaaaagcattatggcattgttgtttcactccataaaaggagatgcaaattttttgcacaacgaaattcacatcctcttttgtgcaatagaaacataatgtgtaatgttttttgagaagaaaaaacatatataataaaattatgattttattgtaaagagggtttaaagcatggcaataatatagatgtgtgattccgctgtacaatgtgtacaactaaatcacaattctattttgtgcaacaggttctattgcaaaacgaaatgatgatttcgttggatgacatgttgttcaacaacggaatttgtgcatcaacaacacaaaaaataatgaaatcatgatttcattatgtggaatctcacaataaaattatgattctatttgaccatgaaagcaacaagaaaaatacctagcgcaacatgagtgcatggtggggtgaggaaggatagtttggcaattgcatttgactagtaggggccaaaaacaattttgttgggatcaatagtaacactcatcattgtattgtataaaacacaacccgattcactatgctgattttcatagatatatagggatattaaagatagtcaattcaattcacttagcttggtcttcaattgattgagtttgaaatgaattaactcaacttaattgttagttgaaaaaataatcaatttagttcaatccatttaatataattttaagttcaattaattttaagttcaacttagcaagtacattgattttttttaaacttctctagggatcttatttccactcattatatactttgtaacttctataaaaggatttaaaagacttgtctgaattcataacgcagttaaaaaatttcacttggtgtttctcttatctatgactttttttcttagtctctatgatggcgtagaaacacatttgttcagattgtcctttacttcattcttccaaaatttcttactgtgagagtgaaagttatcatagatcatgaacaagagagttattataaatccattgatacatgtgttcaatttctatggataaaaaaacaaaaagaagatgactttcataacctctcttttaaatctcttttaccttaatgataaaatcatccttaatgaagtgagaggatattaacttaaaaataaccccgataactttaagtctaacaatagtcttaattatcctatttttcataaggggtcctaggatcttttagttgatgagatttttcaagcagggatttcatggattaatcaaggcacttccccacctcaattaaatataattgatattgtccttgtttctaagaaggatagtcttataaaaatgagggattgaggcctattttgctttgcaatgttttgtgtaaagttatttcaaaagtccttgcaataggattaaactgtttcttcctaaatgtatttcttaagaacaatatgcttttgttgaatgaagatctattctggataatgaataaataataatgaaaaaacaccatttgttggggactagtatcgatgtgccattattttcattatatatttatatttgattatttaactaattttttgctattgatgttctatttaactaatgcagtatgacattaaatcaggtcattattttcctttgatgggagaggtctttcatacataaatacaatttaagtttagctatcattaaatttgtgtggttattttttctattttttaaaaaaattaatctacaaattcttggactattttaggatttttataagtaggtccttatattatgaaagtgggagtcaaacatgtttgttacacatgaaagtgaacgggaatttttgtatgcattttttcttaaaaaaacaatgagaattgattactaaagctgaattttttcatgtaaattaaataattttaattttttttctcttttatatgtttttatttacttttttttctttctactttaatgaacagaatgtaatttgtctagtctgatttaacaatttattctttgaaaataaatgctaacaagtgtgttaaagatattgattaagtaacttaaaagtataaatatttttaaagataaaaaattatattattcatgatttttttacttttttttataatttacaataattttttaattaatgtcttaaggaaagtgaataacaaccattcttttgaataccaccataaaattccaggttcaagaaaagacaccttctatcccttaaatccatccaaaccaaatacaatataaatggacatataattaataagtttacatgatatattatatcggcatgctctgtttaaaattccggatcaatgtgggttagaccacaaaacatttgaatcaaacaagttaagctaataagttcacatgtcaaccgatagtcaaaaagaattttttataaacagtttatactattccaattagtttagcgtataaaaataacgagaaatgctataacaaaacatattttttaaaattgatttctataaatagccactaaaacatataatcataatcaggtgtgtaatttaattagttaaataaaatatgtgaattactataaatttcttatacatgagttcaattttgatgaacaacaaaaatataaaaaaaaaaaatatgttgctaaattgatttcctataaatttaatttattagtttgatcacttttccattacatgactcacttttcagacaatttctgcaatttcttagatgcctggaaagaaaagtactagtagcatttccctaagataataactctatcaaccatatatgaagaggaaaggtaagcacaagacaagaactaacataaggttcatactaggatgatctcaaaaagaaaagagaaaaatcatgagcttgtactatccttggattcatgaaacaaaacgtttgactacctgaatgagttggtttgctttggattcatcaccaaactccaccccatggcacccttcttcatcaaaatcactcaccacaaccacacccttctcctccaacaacaacaccaagtccttctcacgatcaatcacagggtcccctccattcccactcaccaacaccctccaccctagctccctcatcttccccattttcccaacccacttctcagccctcggattgcaatactcgtgatcacggtcaacgccaaccggcagcgccagctcccacaacaaatccgtcacacacagcggaagaacctcgtcgttctccagcctaacctcggatttgctcctctgggtcccaccgaaaaacacctgccgcaatatcagccctctgatcttcaacggcgagagatcgctcgccgtgtcggtcgcgcgtagacccgcgaagtaggcgattgtggcccccgcactgctccccatgagatagcaattagacatgtcggcgtgtttggtcaaccattcttcttcctcgctgctgtctcggataaactccaaggcttccgccgcgtcgtcatacgccgccgggagacggtgctccggcgcgaggcggtattcgacagaggccaccacggcggggacggcggcggacatggcggcgcagaagtcgtggaacatagtggaggcggcgctggttacgatgaagccgctgccgtggaagaaaacgatgagaggtagcttcttagggtttggggatagtgctattcgggggaggaataagcggagccatgtgttgttttgttggttgatggtgatgtctttggtgagaactgggagagtggggtcggaagagggtgcggtgctgggaatatggcgcaagcgatttagggttccgttagggttgagaactatgttgatgtggcgaaagggatcaatgggttgtttagacatggtggaatgcaactttgaggtttgtttacgatgaagatggaagtgtcgtacttgtatgtttcaatgtgtagattgtagagattattggcttttatcacccaaacttagtgtgtggattgcatatgcagccacgttgtagtgattttgaccattggatttcaatcaaatgattattaaaaaaatataaatataaaaacatatttatatgtttaattatgaaaggtttcgtcacattaatatcagaggaggagtattcaatttgggatgagggtacactttactcggataagaattgttgaaaacttgaaatttcttagcactcaattattgaatactgttgatcaaagtagattagtagtgtacgacaatgtgttagaacaaaaagaatagtgtctttgacacggctatcccccaaagctaacctttaaagatcaatgatatgtttggtggtggataagtaagagaaaaagagaaaaaattaaatttgatctgagtttcatatctttttctttctactttaattcatttttgttcttttcactttttttcaacccaattacacatcacctacaccaccttggaatttgttatgagagggagacatgaattttagctacaagaatggtagtaaattagtgcatgtttgtgtaggtgtttccaacaaaatcaccacatttcaagacacaacgcccaagtttcatgtttgttatttctgcgttttgttcattagagaagtctctgaattgaaggaaattattggcttttatcaccccaacttagtgtgtggattgtatgcagccacgttggaggtccggtagtaattttcacaatctaatgattattaaaaataaaaatatgttcaattatgaaaggttaatatgttgttataggagctgtagggagttgtgatatagagaatccagttcccctcaatgtaaacctgctgtgttcaatatcagtcaaagttccaatacatttcttttctttttttacatttttttattcacattttctttaaattaatctcatagtaatgttttcttttcttgccctcacttattttttttaatccattttcgtatttaaatttgttaggtgggatagttagatctataaaagattaaaaattaaaattttatttcaaattcgtaagactatgacaaattaattgttaattttttctattaacttagacagctgtataacaccgtttgaaatactaggaatatatcataataaaaagaactcttattagcattcgtttattatattcttttaataaatatttgatattattaattttgttttaaccatatatttatgttgtgataatgtttgttcttatgtatatgtatattattattattattaagcaggttattctcaagcctcaactctcactcactcctctgagttccaccaaagaatggttgacgcaatatcaagccttggatcttcaatgacacgcacgtagacctgcaagaaaaaaaattcaacactcatttttccattaaaattataatgtgtgaaagagagagtagtgtaacatcaataaatataaaaatagagattatatgcgtgtgtaaaatagattatatagcattagcacacagttttaaatatcggtcgggttgtggactcgttgtttcatcacatttgtttttaccgtgaaagaaaacgatgagaggaagcttgataatgttaattacatgcacatcgatgaggtttatgtaagaacgtaagatcattgatttcaattattatattattgagttaaaatattatccagtttttatttttatttttatttttaaagtgtttctgttaaattaagttagtcttttttgtcggattaacatttatcacatcagctaaaatttatttcatcaattcaaaaaattgataaaaaaaaaaaagaatcattaatttcagagtactctacagaaccaattagtaaattttgttttttttataaagcaaaataaaaaaatttaaactcagaaggtgtaattgaaaaaaaaaaatctgaggatgaattgttatatgtttagagtgttatctgtttactacttaatttttatattgttttataatgttatatatacgaatttatataatatatttttttttactctattttttaaaaatatgtttgatttaacgatagatatttaataattttttattgtaaaagatttaacatattaataaatttcataaattattattaacaattttttaataaattttaatttaaaagttaaaaaaagtatataaaattttaaagaaataatattttaataaaatctgaaaaactaaataaaatcacaaaataatagtttaaataaaaattaacccaaatccaattttttttttttttttaggtttgattcacgtaactttttgttacaaaattgaaccaaaccaagcgataaataccgtaatttagtcttggctctttgcacaaggcacaggctgattatttggtattattaattgtctatttatatattcttttgagagagtgatcaaatttgcctgctgaaatttgccttatatgtgtagctgaaattaaaatctattatatataggatcccttatatctgtggctgaaatatgcctgccgtggctgatatataattgtgaaatttgcaattatgaagcctttattattgcaattatatatatgaaacactccaatagacagcacattacaatgtggcttgattctttcaaagtttttttagagaaacaaatgaattggcgaaatatgttcactagacccataatattacaacttcgtccttttctattgtacaaattaaactagtcaacttaggctgaaccaaccccattttaatattaagcagagctaaaataatgtataataaaacagtgacaccaaaaaaagaaactataataatctgtccaaccctgattagtcgggatgagttaaacctattacacaccatcaaagcaaaacaatacaattcgattcaaaatagtttaaattattttgaaaacaaatacatgattaattcattataagcatattagtactttattacgaccaaccaataatgatcagaaaaaataaggtacacaatcaaatgtttatagcttgcaattaataatctgacagatcaagccgggaaccaggaaaacacaaaacaagacttcaattttcagcaacacacttcactcaccggtcaccacttaacatgaaagaaacaaaataacaaaaaaaaaacgttaagtagactttaaaatgtctatatccaatatttcttattctcttattaaatgatgaaatataagatcttactaagtaatgtcctaagaaactaaaaaaaaatagttagtataaaaatcataacaaaatacaaacaaaatcatataatactacaattttctatctttcaataaaaatatttttattttaagctcattaactgatgtcctaaacaacattaattaacactttcttacaagaaattgaaactcttcctcttgagcaatgagcattaatttaaagctgaaataaaagtttgaattaccccatatagctccctgccttcatggatcannnnnnnnnnnnnnnnnnnnnnnnnnnnnnnnnnnnnnnnnnnnnnnnnnnnnnnnnnnnnnnnnnnnnnnnnnnnnnnnnnnnnnnnnnnnnnnnnnnnaggaccattccccgccgttggagtgcaatactcgtgatcacggtcaaccccaacgggtaacgacaactcccacaacgcgtcattagcacacagcgctaaatgcggttcgttttctaacctcagctccgaacctgtcctgcgggtccactgaaaaacggttgaaccaaaataagcccttggatcttaggaatctgattttcatcaaccgcggctgcatgtagacccgcgttgtaggctatgtttcccccggcactactccccatgagaaaaacgttggagtaatcgacgtagtttgtcagccaatcatctcggttggttttgatccactgcagcgcctccacggcatcctcgtacgccgcggggagtctgtgttccggtgcgagacggtattcgatggacgcaacgaccgcaacgacgtcgtttgccatgttgaagcaaaaatcgtggaagattgttgaggccgcactgaggaaaatgaagccgccaccatggaagaaaaccaataacgggagtttggagctgtgatccagtgctacgcggggtaggtagaccctcgcccatgtgctttttgattggttgatggagaggtctttggagagtacgagggtgttgaggttgggatccggtgcgggcgggctctgggggggtttgttggggcgcgtgacggtgccgtttgggttagggataaggtttagttccttgtaggggtctttgttgcatgggattgtagtggattgggtttggagagtgagtgagtttgcaatcaagagaaaggttaagaaaaatgcaaatgcaaatgcaaatgcaattgaagatctccaaaaggatttgtagtgtgtgaaagagaagaagggcatcatggttgaatgtttgaaaactatcatcatatcatagcattaatcaaaagatacgtaagaagagggagaaaatgttcatggaagagaagatgataggtgtcatatctttatatatatccttgatttggatttagtcatttagagtctttgcagggaatcccacaataaattatgaaatctaaaagttaaaagaaggggtatatggtaactagaattctacttttgtgctgaacttttttggtttatccacttggtggtgttttcttggcctcatgtttttagtggactagatttttgtatggttttttttatttggttcaattcatgaatgaatcatatatagagaaaaagtttgtggcatgagccgagagaactatacccagtgttgctaatttgtcttcattgagacattcttggatgcaaagtggtaccaattatatttaaagtttttgctaaacaagtgttttacctgtttgatgatcagtgatcgattgaataattgactaatagtactaaattttgaacattgtacgcaagaactttttctctttctccatgttctgaaaatggacaagctttgttagaaggagaatgaacaagaattagctaagggtaaatctttaattttacttaatctttatggatgtgtgagttagatattttaatttttgagaatataaaaatatttcataaattaaagacttcacaaaaaaagtcattttatttttcactgtcattttacacactaatattaactaattacagtgaataacattatgccaagtctaattacagtgaaaatattttcacaagtcagattattaggatttttaaaatatttaattcataatttcgaaaattaatatgaagaagtactcattgtcaaatgcttgatttaatcaaattcacggtttataaatgtgttcaatttctagatcaaattatgacatgttaacagacaagatgacaggttcataacaaagtagtgttttgttaaaggggcacaatctatatgacagttaaaataggttgaaagaaaagggaaacctctaacagagctatattaactcgatcgtatatatgtagtacaatttaacatttaacaagatgtattgcaagtcagatcacatcaacaaaaacactgcaaaaaaatcatttaggcatagagaaagtaaactcttcaaattaattggaaaataatatatatatatatatatatatatatatatatatatatatatatattcatcactaataatttgacaactcaattatctctatccgaattgagaatttaaaagcaaagaaaaagaattgcatgaaacactgctgaaaatggaaagatttctacttatggtgcatcacatcttaatttaactcaaacataaagtggctcttctctattgggtccgcgagatctggcccatgatgaccttctccaaagtttccactacgttaacacctttgtcttgaaaatgatcgatcaagtgctagcaaaacattctgtttatcagttaagatttatttaaaaaaatataaattaaaagatcatcatttaattaaatgagaagtgaaatcatcaagatttgtgatattcaataaatttcacaaatttaatacattgagtccatgatgactttgacataacattgggattatcgtttagaaaatagtaaactgtaaaatgtaacgtaggtataatttagtttcatgatctattatacttttaacaccatcaaagctatttgacttatttgttttataatataaattatattcctttcatcgaaaaataagtatgtattggttgttttacacaaataaaaaaaattaataaacaaatgaaagaaaatagtagttttaaaaaaattaattaaccttatcaaaaaaataaaaaagtatagtattattattagattaaaaaactaaagtaacatttattaggaatattaatgaaaaaagtaatgttatattgaaaagttaaatgtaacatttattttgaaacaattttttttcacaaacgtgatacttgttttgggatcaagggaatactattttatatatagcatcacttttgtatgggttaattacatttttagtctcttaaattttataattgtgtaaaattaatttttgtttaatattaaatcttttaacaattagagccaataaagtctattagcaattagagcccaattaaaaaaaaaaaaagcttttaactaggatgactcatgaacttttctctaagacttaactgagcccaaagctttatcctcttttatttggtgtgagccatcaggcccacttacctgcatccattgattgttgatgccttgatggtgatccctaactgtggtaatattgatagtttagttatctagtattttatcatcatcctaagctacaagtcctctagtttcctaatctcccattgacgactgaaatccaaagagaaagaaagagttgaaatagaatgtctatttgtaataatgccctcagaagattgcaggaaaatatactacagaaggtctgattattgggggattattaaatctctagctagttcaagtggacctaagatattgtgctctacttcaaatggacataacatgaaaatatgtccacctgaaatatacaattcgaacataagggtacatatatgcttagtgataataaaagacttatggtttcaaaatcaatctatatatccacgataacgttggaagcaacaattccaaatgttccattatataatttattcttcttaaattcattggagaaagatgaaaagaatggaagctagtatgaaacttataattaatgaaagtgtacaatatgtagcaaaagcaagtctactcaagtttgtatccatgtcagatgtactttgggagattcaaaacttcttccacattctattttttatttttttccaatggatctcagtagcacaaatcataatgaaacaattagaatagtttcttccattatggaagaatttattttggaaaaaactattgagagattcccataagattgtctaatcagtgtttgtcccattccagttgaactttaatttgaattgccaaagggagatagaagagcaatgaaagtgattaatttgcaaaactatggtacaataaaaccacatgaatcgcaccgggatagcttatctctatttcatcattcatttgtatcccggtacaatgtggtttgaacttaaatatatctttaaggcaaagtggtggccagacatggcttcttctattaagtacgatggatgacttatgacacacgtgcaatagttagggtagataattaacacaacaagcatataagatgctcatcaagtccatgatatcaggaatatcttcatgtagggatagattttgggtcttatgaacgcgtttgtgaccttacaacaattgtcatcagtattggagtggatgttgcagttgtatatcacaccaccaacaccaatatattagttgcttacttcagttacttgtattcaagtaatgaaggtcagtacgtaatttgttttattatttgtaactactaatttttaagggctatataaagtatcaagtatcaagtagtggttacaattgaaaaattatgtcttcaccatctgttagggtttggtgatgggaccaaattggctcaaaggatatgcggggttttattgctgtaggcagaagtaatggatggaatgaggtggtgttgcaaagaccaatgtaatgagctcagttttcaaggtgggaatcactgctggctacagttgtcaatatacaacttttacttagtatggatggttttaggttataatcagagaaaatccaagctagaagttatacatagactagttttttactttgacgcggatcgaaatcgaatcctttgagacataaccaaatatgcactaaaactttattagcagtggaatttgcttatttaagcattaataaaggaattttgattactaattctactttagatgcatgtgatttggtgttaacttttagttttttgtttcaaatgacattattgagttcgacgcccctccaagaatatttgaagcgaacatgaagccccttctcaatggcaaccctttctattgcctttctatacttaccatggataaagagagagaagatttgtttttatcctatagagagtatcggatattatatgtacgtatgtggtattttaataggagtgcatatgataactatgaggaagcagaacctagtaagggaaggaagcttttttttatcctagagtttgggatatgtatttcatatttccctagccttgcattagattaagctttcaaagtgttgtaaggtgcattcgatttagcttgagtgcttccatgcttgcttcctgtctattccctcttagtttggcatggcttgttaatatagttagcgtctattccttgtgcttcatacacattaaatatattgtataagtgactttcaaaatatgcttctaaaacgccaaaaataacgtattcaatcaagtgcttatgatgataagctttcatctaaataacttttattaagaaagagtttaattaaattgtttacaatcatttgtctgtatgcttcttaacaagtacgatgctgtaaaatccgtattctgcaaaagcgtgtatatatataattcatgaaaaccattagacgacaaaaaatcaccagactgcagaaccatgactttaatctgagaatattattgacaaggtttgaaacacagtttgcacccacaattttgaaagatttttctactaacacaacagtaatcatgtctgcaactgcaactacaaccacatcagccacatttatctttaattttggataatgtcaagactcgcaaagtgcaattataatcataaccgcaattcaaaaccttgattataactataattttcatatatattaccaaaaataagagtgatttattggaaaggtgactgattattttgctggctttataacaaaccgaaaggatccaagttagaaagcaaatataataaaagattgagaaaatgattgaggttaacttttgggcatttgtctccataagggagacatagttgccccacaagttaggttaatgcttatgcaagggcttgttatctcaaattctggaactatagaaatgcatgtgtgtatatatatatattaggaccacgctatagctggactgagacagtggcttttaatgtgtggtctttaacaacgaagttaaggaatatatagggttgctttaaatcagtggcagtgagataactgatcataatgacgaaaagatgaatgagactcatgggactaagtatgataggacctgtttgatatgaatataaatatgtgatgaaaggggaaagtggcatagtgttgataaaaaaaaaaaaaaaaagagatgcaaaagcatagaattaattaaaaagggaaagggatagtgagatatctttgtcagcaattaatgcgggaaaaagagataagagagtaatctaaaatagaatgaataagaagatcttcttagtctaagtttttttagtctctaaaaagtgaaaagaatgcgaagaatatatggatccaactcatcaataggctctttgtttcactcttaatttgtcctcactgaggtgcagaatttcatgtcaatttctttctgcaatttacattctgcagatctatgttcagccccggtgtaagaacgaatatcgataagggtaggagttcccacggtccactatgcattttttaaatcatcagttgttagtttttatgttagaactttagtaagcaaaaaatttgaacccataacttttttttcctttttccttcgaccagaaaactaaccttacaactcccaggatccactatgctgtctgcatgttcttttgttttagacgtttaggtaaaataaaataaaataaatattaaaaaaaaatcaataataaccatattaaaatactatgcaatgaattgtactaattaacaccaatttgagttcaatcaactttttatgacatgtacaatttaagttagattgctgcccggatcaggatcatattctctaagccaatgaaatgcgataaaatggcctcaatatcgatatcgataaaatatagataactaactagcttttcaaaaggttgatagaaatttgaaattcattctggatctcatcacatgactaagtaaaatatgtatccatgcaattttatgtgacgaggaaatgacactcgttcgaaatataatgtatatttgacaaatattttcggttaatttttaattttttttattagtttaaaaatttatttgatcatataataatgtttgataaataatcttctttttagtagcgtgttttatttttgaaatgttatcttaagtaaaagctaatttataacttttatatttttttcattttatcttaaaatatttattaaatgttattattatcctttattacatgagccagtttttagttttcttctcttacacgatttattctagctattatttacgttattttattgtattatttttaacataatatttgatcgtattttaacaatattacattaattaacataatgaaaatatgacatgggtttttttataagaaaagtatgacatgtacttaagtttagataatttattttattttagacttggttgagaatattttaagttataagatgagattcattgtatatataatatataatatgaaaatttagaacatttaaactaatgaattaaaataaattgatctataaataaaaatacaagaatttataaataattaaaaacttaaatattataattactccaaaatttatatgaaagcattatatcaaaatttccatttttatcattttatatttatcggttaattcaatgaatagttttacttaacacttatagttcaacaaattaggttaataacttttagattttagctattagctttcaactaattaaattttcaactttaattcaaataattttttagcttttaactagtttatgtgtttatttttgccaaactaagtcattaacaataaaaatgatttttggacactttgaatctgtttaacttaatgaggggtacgtaaaggtaaaagagagagaagtgtaaatataattggtaattggtaatatcatataattgagaaaaaaatttgttgattaataaaatgtgtagagaagaagtggttatacatatcattaatgaaaaatgtcaatttcattccataaagaataaatctatcatcagcacttccacgctatcactgtcacgattaccaccatatcatcataaattttcttccttctttctcttttccccaccctctctagaccacaaggtgttcttagctttgtttaagtttggaattaatccatactcggacttgactatgaccacattgttaacatagccatgcacatggtattcagatcaattataatttagtactattttgatgaatggatttctcgatcatgataagagccaggaacctgatttcaatctcgatctagaagcacgtttattgtatgtagggaacctgagaaattaaaatgcaactttggagtattaagttttgagaatattttaaggattggtgaaggattgtttgtttaaacctacaaaaaaagtgattatgttatatatagctcttttattgaaaatataaaaaaatcagaatgatatttttaatttttgaaaaaaatgacctaaaacagtttttatttaaagggtttctatttcttttaaaacatatacattattataaattctgaacacaaattaattttaattagaaacttatcatttcttaaaaatgttcaaacaaactggccgttaatctaactttgtaggactaacttcatacataatcaatcatttcgcccccccttttttatttatttcggaatgagaatgattctccacttcctttagttattccaggagaaagacccatgcactatgtcacgtccaacagtcaaaatttatgtctttaaacttaccactaataaaaaaaaagtttgtctttaaacttaattataataatttgttgagagtggatggaaaagttaaatcaatcagtaaagacaagattcaagtatcaaaacatacaagatacaactttcttactttcacgttgatctcattactttcacctttgtatgaaagcttaaaggaaacgaactatatctttaattaagaccgcgtgcaatccctataaaaaggattttggccattaatactcttccacacctatagtagctttatgtttcttttatttattgtttcttctttcggccatctctgaggtctctaacatactaactagttttgataaattatggaagaatttaataacactgtcccttgaaacataatccagaacaacaaaatttgaattaaaaatcgctgccacaatcgtaatccgtcccaaataaggttataagtctcatcatgaaacctttattgagattgactcttttcagaagtgtaattatttttaaataggttcgaatgcttgtcgtcgcaattttatgaaatgtttacttttttcagactttattttacaagttttctttctttaaatttgatgtaaaattaataatgcatgtcgtattctatttttttggtaagtaaagaaaaaaagaaacagcctacttaaataaaacatgtcatcaacatagttaaaagatttcatataattcacatcatacatatctaggtaagaacatatcttaattttaagttaaacaaaatgctacagaagctataacctgggactaaataagggagcacgtctataattttcatacataaattaagtgtaccgaaacaacaggcatcaccaaggaaaaaaaaaaaaaacaaagaagtaatggagcgagtcaccaattaagatccgaggagaaaaagtaaaaagaacaatggaaattggagtcaccaattaagattcgtggagaaaaggtaaaaagaacaatggaattggtgaaagctaatatctaaatgtgagtaatgatacatgaatatttttttaatgttaaatattttattaatatctcttttttttttttctcttttagccacataaaaaatcttatcatgcattttttttctcatttttatttttctttcttggtgttaaatgaattaatggttgtttatcaaacttttttcttttccaagacataacaggattagatcggtactaaccaataaaatattactttttcaaaatgcataattatttgctacctgcctttcgtaccattcatgcatgtcattttacttagaataaattacatattttgacatttaagacttaataactatgcattttaatttgcgatttggcaaacattagcggaatatattatgcttttggtatgttcatggttttagggtcagtttttggacttaaaatcattaattctagaagaaagaagcatgtggacctctgtgactaagggtatttttggttgtgggaagagaaaatgagagaatagatgaaaataaagacaatttgatgaaagaaaaataaaataaaaaaattataaaaatttatgaaaatactcttttacccttttaatattagtatatatatatatatatatattttacacaattaagaaaaaatgtcaaatttttccacaagtcttctcaggagtgaaaatatgcagcagtgggtcccatcacttttttaaaaaaatttcctctctcatgctcaaccaatcaccaactcactctccctcctctcccctttcttttgcatgtaccaaaccaaaccatacctaaagctaaagtctgacacacttaaaaaatggaagaaagagtgaaaatcggatggtcatacatttctcacattcgtgggatccagttcatgctcatgagccattctaactttctttcatgttttacaccatgacagactacctcgccatcttgagcaactcaaactctaccaccttgttgtaaaaaaaaactctgacattgttttcttgagttttaattctaatttggatctaattaaaccttttaagccaattgtcttccaatagaattttgaacttaggattacccatactaatattgattcgcatgcaatagagagtggaggatctttttcttttcttggattcttcttctacatcagattcttttttatcacttaacaagtcattaagttgcaacatgactgctacaacattagttaatgttgttatttgaaaatacagactaaactattagcagagaaaaaatatagaaataaaaaatgctaagaattttgtttaggcattaaaaatgaaatttacctaagaaattaaaaacttatttaacccaacgaaaatttataaatgtaatactctctccgttccaaatttttaggtgttttagccatctgtttttttttttaaaataattgttgttttatatagaatttcaaagtataattaatactttttcttaaatatatctttatttaatattcactaatagtagtgtaggcataaaaaatgaaggtattaaataagaatatttttgcccaaatatcattcttttttacttctacaaaatatttcttattgtgtgtgtattaacttcaaacaactaaaaaaatggaatgatggtcgaattaggaatgataatggatagagtattatagtatttgttttcatatctaaatttaaaaaaaaaatacctatatccaactctaaacccgtgcgggtaatatcaactttaatccccgtactcacaaccgccaccgtactttacttatatataaaatcaataaaaaaatactaattaaaaaaatactacaacaaaatcgaaaaatcacttttaaatcatccaaaataacattaaaatcattcaaacttaagtcataataaatattataaatataattattcaacaaatcatttttaaatgtaatgttttagtcatttaacataatcattaagaacttcaacatcatgtgatgatattctttaagacttgcaaacaataaatactttgaaactaattaacttataattatatattttacatataattgtactctatgtgaacaattttgtaactaattcaaaacaaaaagaatcaagtatattagagcgagaaacttgtttaatgagacttgatcgtgtgaggtaaaaaaatatatatttgagtccatttatgttttaatataacatactaaattttatgtacatatagttgtgtctaaattttatacattaaatatttttacaaggagttgtgttttatatactaaatttcatatgtgtagtttatttggtatttaaaaaaccaaaaattatgatgactaattgattaagattaattgaattgtgcattaactcaacattaaacaagtagtgtcatttgcactaactttttttttttaaccaaacatcagcactaacttatgaagtagtagtactattttatcgaaaagtatacagctttttcggttttaattgatgagccaagccaacaactattctcacttatagatcattaagaaaagctttagagatgtactttgctttcaattttctaggtacaaagtttcatcgacctgacaacaatttagccactattttattattgtaagttataaatacggttaagtacttaattctataaatgagtttgtatcttctttttcaaaagtttaaaagtgtaatatcttattttagcaagtgattgaatataatcattttgttcgttcctaggtggagtatttggcataaagtagcaagtttactttgactccgagtaatacttttcatgctatttaatttataattaaatatgttttttgaagcgaatttatagttaaatattgaaacatatcaaacattattgttagaactttattttgccatcgaactactttttctaaattttcaaacaagttttatacaatgcaaaagtttataagtaaatttcaacaaatttaaaacttgtaatcaaataatgcatttctagaaatccactatattcaaggttagttcatctgataaaaagaaaatccaaaatcctgataagttcatatttcataattttcattatttgttctgtaaagaagccaaaaactagatgaaaattatcatatcttacccttgaaatataaggaaaaaagaataatgtgtgctagattaaaatataagtaaattttaacgaattatttcataattaatatagtatcaatttttaaaatattattcatttaattggattttatttctaataatttcccattgtttattctacgtaattaatacaaagaataatttagaaaataaattaactttttaattgaaattatcaaaattaaataatgatttttttataggtttgcatgattcaattttttttcttatgtttcaggaaaaaagaagtatataataaggaggataataaaaaaaaaaaggttgatgaaagatcaaggttctcacctaacaaaacctaaataaatatttgaataacacaagctgtcatgctagcaaacaatgcttgcctcacctcaattaggagacgtaccaatccaaaactgaaaaacactgctgcactgcactgcacacatagcagagttttaaattccaggatttgattttctgaaacttacttcacagggcaccatcagccgccaattccactcccaactccaatgtgttatatcatgtatcaagacccttgtgctgccctcacccctaccttaatccctcttcacatttacatctaaaaaaggcatatatgaaaaaaatacaaatatttattgtatctcgtaaaatatacttcactcatgcatccaataagtggttaccagtttgtttaaaaaattacttatttgtacatatttttatgatatcctaaaaaagtagcctgcaggaatttttactctgctcagtctttcaatcatctcctaatagtttctcttttcatttcattaatacactagtcttaatattaatttcttttttcttactatttcaaaccattcattgtcaccatctatcactctttaatctatcatatccttaatttatctctgaattcagtttcaacatatcttcctaaagaaattgtaaaaaatcaaaatgatccttatttctcaatttaaactgttcatcttaacttcaaaattcttgagttatgatgaattttagtgcgaatcaagatatctttcatccaaaaattaaagagtaatttataagaaattaagattcatttaataaattaacctctcctaacatgtttatgctcaaagttaaggaaaaagattatctaccataaaaggaaaaagatatccaccataaaagcagttatgatgaattttagttatacataatttataaccaaaaaatttatattataataatactagtaagtaattacccctctaaattttaacaaccagaacaaaaaaaataataaaaatatccataccaaataacattatttgaaaaaatcatgtttccccgttttcaatttcccaatccaacaatctccaatgccaaaagttacataaaaaaagtccaccccaacattattctcaacgactcatccatcaaccacattaacccccctcccatcaaccatcatcagtcacatcatgatgcctcccccggcggctgcggttgctgctgacagcgacgactgcagctgcagcaggtggtggtagcagtccgccgccgtgggcctctgctccgggttctgctccatgcaccgactctgcaactccctaagcatcttgggcacccctcccaacccacacgtccttatcaagtttcccaccccccacacatccaccttaaccccatgcagccctctctccatctccggcgcgttcccctcacgctcccccgtcacgcgccaccccttcagctccggcgcccccgccgcctcatcaaacccgcacacaaaccactcctcctccctactatccatcctcctcatcaccttctcccacttcaaatccctatgcataaacgacaagtcgtgcagcgccaccaaagccttcgtcacgtacttcaacgcctccaccagctcctcgcagttccctggcctcacacggcacccccttggcttaaacgacaaccccagttccctctccgaaaccccaaccaaaacctccgcatgcggaatcctatgatcgagtatctcataaacctccttaaccgccatccactttctcttttccgaaaacatcctcgtgcacgtgttcggcgtcacctcagtcaccaccccgttaccgtaacaaaccctctcaaaatcactgtaagcaaagcccttggagttacttataatactactgcaacgcttactcagcaatggcagcaacaatccgatccgaaaacacggaactaaagcctttaacctttccgttggggtggttaaattcagttctagtaaatcagtgcggttgattattccttcttgggacctactcatcgcgcaaaacgtcaccgtattggcaactgcatagtatccgagtatgtagggtaaatccatgtaggtccatagtaatttagcaactaacgtggttgatggatttggctgcgtctctgttaactggtgcgtttcttcgcctctccataagcaatagttgttgacaaaacctgttatgttcggccattggtcttgtaataacaaattcgtggattccgttgctgttgctgctgctgttgttgctgttggtgggggtgatgacgtgggttttcggattagggtgagattttcggggcagaatttttggatgacgcggttgatgcaatcgtcccagaggggaatgaaggagtcgcggctggatgacgtagggttgagggaggggcggatgatggggcccacaatttcgaacatgatggctctgcagtccaagggttcggatgttgtcgtgaagaagagttccttcccttgaggaagatcctcgtacacgtctcttcggagaggaaaacgtaggtcttcgggtgggggttcttgcaagtgacgcttaagctccaagaggcttgggagggtttgcggggacgcacgtaggaagcattccatgtagtaatcgcttgggtctcggaaatccaatgtagcaattgctgcacatcaataataatgcaagaaaaaagagagaaaaaaagtaattctaccaaacttagaacaacaataatgcattatagtattatacatgctgcttcaatgtgtttggtgtcgcttatagatttaattcaactttttagattgtcaatgaagttaataaatgtgcatcattagtctaataattttactctattatcaattaatggtgaaaaagttttattatgaatagaaataaagtagtttttatttatccatcttcattttgaaggttctgaattgttgaatgcgttaagaactgagtgcagagaatccaaatgctactatagatttattatagattttgatctaaattataattaatcatatatgtaacaatttgtaattaaataagaagtgcatgcatattatttattcaataataatgtgagcaacaagggcaataacaaaatcaaataaaaaaaatatttgaatgagcactattaatagacgagtgaaaaaataatatattttatccacgatattttatattgatctttttaatgccttatgaaacaaatattatattagaaataagtttatttaatatcctagatgttcaatattttttcaagatgctattaaaaaaaattgaaatgagtgatcgatcattacaaagtttaatagtgaaatgttttagccaaagttcaatacatcaaaaaactagctaatatcaaagaaggagggcagtgaccactgtcaaaaagagactcacatcttatgggaagtgctttggagggaaattggactctttcagcaaaacctgggaaagagagacaatgacacagtgagatagaatcctagaacatgtaaaacgaggcaacatagtttaaggaaacagctaggtttggtttggcaccagcagaagaagaatctgaggctggagaagactttcttctgccaaaaactttgacttgctgacccgaaacgaatctgtccacagagaaacccttcagtgggccatcttcgaaatattccatggggcatggcaccatggcatcatcgaagcaagtgagttcgtctgcgttcagaaagcttgaagattgaagcttcactctccctctatggacttcaccttcttctgcccacaaactcactgattcctcccatgacattcttatcttcccaattcttcggagttctttggatgaagaagaagaagaacctgtaacgtctaagagagtgtctaaccctaataaaccccctcttgacccatgaaagaaaggttcacccccacttgtcaaagccaattgctttgtcctagctgcaacaatgtcgacaagttacaaggttaatttttttttatatataaaaaaagagcttggctctttgattgcgttttcatttctcactttctaatgcattattcttctctagaagggtgagaaacagtgcttatagttataacggtcagagaatcacagtaaattatactgttcctttgcccttcttcatgaatgtatccaaactaccgtgcattccataaaaaggaaagtagaaaaattaaaaaagaaattaaaaacagaaactttactgtgtctggaattacgttagccaagcgcattgaagattaggtgagacgaagggaaagtgggtgagttcaataaaaagtaagatcatatctaagttttcccattttcatccttcaaactacaaacctgaaagagggatttcatcatctttaaaaggtcgaggaggtggtggaagtgctcttgtagcagcaagagctgttctagcttcatctcctgaccctaaagaggaaacagctctgccatgagaggatctcattctggaacccatgaactgtgcaagctcttcaaaaacatcttcatcaaaagaagctgggagtctatgcaactttctctcataaggcgaaagcctgaaataactcttcccaatttgttccctctcaccccctctttcccattcgtacactttcctgaactctcccaacatgttatcccatttagtacctgcagttttagcatctctattcaccccatgcctcttgagaaactcagccacttctttatctttatcagccctagttttcgctcttgtgattcccaattccgcttgttgttctgctcttgaagaaaaatcagatccaccaacaccaccaccacctttgtattgttccttccaagctcttgccagccacagcatctcgttgggcttccaaactggactcacgtatttcccttttctgagttgctggtgaatttgctctccctcttgcttggtcccttctcctgagagcaacgggagagagtgtgttggagatgaggaagtgtctgatgaagaagctgtttgtgtttggggttgttgttgttgtagtgggtttgatgaagtgtgagtagtaggtgaagggcttgattctgaggtgggaagcatggccatttgggactgtttttgttgtgcaggaggagaaggtagaagctgcttccattgtccactgtatctgggcctctttgggttcagtgtctcaaactgaggctcaaagggtgaggaacttgcaccacttgaaacatataaaggacttggaatgaaagggggtgctccagttgcaacgacaactggtgaaagttgttggtggtggtggtggtggattggcctaacttctgtgatgggttcctcatgtggggctttgggagaagatgaaatttgctgttgtgtttgttgttgttgttgatggtggtggtgagattgaggttgctgctgttgagattgttgtttcttggttgtgtctcccttgtcacccattatggagtaatgggccctatcaaaaaagggtttttgatgagagaatgaggcagatacaaggaaggggaagttaggaaccgaaaacaagtgtagtagtagtagtaggtagtagtagtagtgttgctatgttggcattggagttgaactaggtagtgttgttgggttaaagcgaggttttaaattgggaggtgcttgtttttttctatttgttggggttgtggctgtgacatgttctctcaaaaggcttttgaatggcgcttgttggcttgatagatggatgatggcacttctgccatatcttcaaaagggaaagtcacagagtagagaggatcgcagcgagcaaaagcaaacatccgaaacgatgaaaagtagcaacagaaaggagaaaaaactaaaaagtcaagagagagtgtgggaactaccgtgaatgagacggttcgctttgtttgtgtgtgtgtgtgtgtgtgttttttcctttcttttctccttttttatgataattattattaaccctttgataatttcaattaagtgaagaagaagcagcaccgttgtattttgtattctgtttgatgtgtcattcttgtcaagtaggagagagaaagagagaggggtgtagtgtagtgtagtgtaagtgcatgatttagagaggggtgtcatgattgtactacttctgaaaaacgcggctctaagaattttaacattgtttgtttttctctttttctattttttttccttttggacttttagatttattttctgttttggggtggagttattagttaagtaacttcattgaatgtttgtttgttatgcgttttatgatgtttgagaagtgagaaagagagagagagagaaaacatgttcccgcgcagactgagggcgtggagactgagtgtgtgtgagtgaggtttttttggaaagagagggattaattagtgagtgttgtttgctttcggggtttgagagagtcagatggagacttcacgaatcgatggctctgccccagtgagagactttgcttatgacaattttggctctgtcctatttttcttccatttttttctttctttaaattaatattttcttcttttttttttttcgttggccttggcaagtccttgccttccacctgtctcacatctatttttaggcctttctttattttcaagcaagtaatgctgccttgctactttttcagtatcattttggtcttttgcttgttcaaataaacgctcctaatgaaatgactgaaaagaagaagaagaaagaaaaacaatgaatgacaggtaggggtggagtcaagaaccttaattagcggaaataaattataaaaaataaaattagtgaatttaattatataaatataaataaaataaaatataaaaatataagattttatttataatttttaatttaaaaaaaatttattggtgaatttaaaaaaatgaaagggtgcaagtgcacaccctcaacctaatatagatccgtccctgatgacatgacaggagacatccattgaataattaagcccaaacttaactcgctatcctattagatgtgtgtttgaatttaagttgaaaatataatagatattgttttatataaatctaaaggataaaagtaaaaataaggatgataatgcttctgttaatatgtttgtctcaattatatcttgtctttctactcaaacacatactagaaattgtgaatttagaagaatttatttgattgtggacatttataaaaaaaatgattttgtggaattcatcaccatctctttcaattttatacatcaaacaaaaatggagtttggcttcaactatttcaattttgaaagaagtcaattgtcctggtattaattgcgttggtgcttgagtacggaattataggttcaaaccccacttagcacactttgtcaatttctaactttaacaattgcacggacatggcctttttacatctcacttctacaaatttttgtgggcaaatgtcttccaagaacgcgtttcgatatattcatatgaattttttttcttatattattttttactttttatatctcattacttttttcttatattctattatacttttcattttccccttattttatcttcataacaaatatttattaaaataaaatttaagttgagagttgagacttgaaagtatggaaatagtacttttaaaaaacttgtatttatctcattctgagcaacgcttaaatctactaatacttgtcaaatattaattagaataatgtcaacgggctggggagaagattggtagcactcaccattatccattcatgaagtataattatgcactcaacttttttttttttttacttacttctatgttttttttttataatattatatatatatatatatatatatatatatatatatatatatcaatttttctactaccaaataatatatatcaattttccatttttttcatcatatgattagtttttcttcaaaaaatggttccatgtttacacgagtatttatcaggttggacaattatctagctctatccatgcacgtatatatgctaaccttggaaatatatttttgaaatctcataaaaataaaataaaatgcatttagttcaaggctaatttaatgtaattcagacaaaaaaaaacgttccacaaaacaaaaagtccaatgacgaatttaaaatttataaaaccctgaaagtctaaacagaatttatgaaatctgtctttgagaagtgttagctcatattcaacataacctcctttctaaaaatagatacaaatttagacaatttttctatttaatattctattagtaatgataaatcacattacaaattcttatttatctcaattctcaactatagtatctattatataaaggtataattgagaaaaataattagatttaaaatttgaaaataccaattgtttttggattaaaaatcaaaacaaaaaaactaatgggctgatcccaaaaattggaccgaccaatagaaggaaaattaggtgagtgtcaaataataactctcatgattacactaaaaaaactaaaatatataaaatacaagaagaaagtaaaatcaacttcccctgaaaaaagaaattggcgttaagcatgctttagaaaataaaagggtgtaaaataaatacattcaatatatttcaaaaataggcttaaaacaaatttagcatcataagctcaatagatgttaataaaattcccttacttatcgagtacctacgagtgctatatactaccccaatactcacgcttgtcttgtttataaatggctaaaacacagaattttgttactttgcctgcaggtgtcaaattgaaaacctatgcccagctcttagtgagttttacttgccaggctgtcaatatctcaaggataattgttttctcttttcttttgtcattgcaactggtcaaactatatcatatgtcacatggtatgaaaaatattaaatatattttattaaatattttaaattactaaataactttttatattttgcagcaactttattttttcaaatgttatcttcttcttttttgtgaggtttatttcataaaaatatagcgggggcaaatttacctagcaaaagctacagagatttaattttccctcagcagcataaatcgcagatgttcgttgcatttgatattttgatagcaattgaaaatagtgtttatcatcatgtaacgtgtaatataggaatttcccccagctgccactttattgcaacggaatttttccttagggttctttgtgattgatttgatcgtgtaattactttgagatacggagatataacacaatgatttcgacatgtttgtctctattccaagatttttaataataagtaagaataagaacaagtgctgtcactttttagttaattttgtcgttttctccccaggtgtttcatgttttgttactgactgtattgttttgctaatacaaatacaaatttttttaacttaatttatttcgtgatagtgatctacatgactacatgttaacattggcaatccaagtgatttacgaatgcatttagtttaggtaaggatgtattttacaggataaaatataataataattattaataaaaattaatgattaagataaattaattatcattttttattttatatgtatgtgtgtgagagattttatcataattcttaattttaattttctaattaataattacgagtatactatattttctaaagtatacttggactaggaaaatccactaatgagatatatatgaaaattggataaaattaaataatttatattttttaatagttataagaaaaattgattggatacacatgcaaattcaatttttttagaataataaaaataaaaattttgtatattttaaatttaatttttcttaaaatgattttccaaaaaataagcatgaaaaaatgttttattttggaataatgtatctaagttaaccctttaatatttatcaatacaattttaataatgtttttctaacgtgtgcaacgttactctcaagttgcatacacaagtttaaccctttactttaatgtttaatgagtaattatacatgacaaatgtggtaagtactaatatcttccaacacgtatataataaaaaatctccaaaccaaatttttgtttcgaagagttttttttttattaaaatagtttttgtaatggtttgtctaaaattaaatattcttggtgaatttgtgtctgtaatttttttctttgtcatcttatcatgatcctctgtgagagcttggctttactgtttttagagtagtgagtaagatacccttgctgtgagggtatggtgtctgatgtggagctagcaacgtatggagggattgtcaatggtggaagaggaggccatgacggttttgttttcaacgtgaaggattctggcaatcagagctttaatgcagaattgtgtttttgcccttacagataatttttatttatatatatttgataataaaaaaaattggttttgcactcataaaaaaacaagtgtttttccgtatgactttttttaaaatgaacgtagaaagttataaaagataaaaaaaaaaattggaattggaattggaattggatttatccttttatttttatttatttttttctgtttcactcctctaatattaaacacaaataataagtcaggacacaagcacacacaattacctgattttaatttataaaaatttaaataatttagatttttctatcatatgtttatgtaatttagaaaatatcataatatttttatataaaaatattatatactatttttggtcctcattaaacaatcttttaaagatttttttttagatttattcctgttcacctggtaaatttttaggacccaacttacttatacttctattttatttttcaaaaaacactcctcttgtgacaattaataaacttctgttcatttaatggctacactacttctttgtattgttttactcttttgtttcaagacttgcactgcacccaaacacctgaatatgcatattgtcgtttataaatttacacaaagaatggagcattgttaggagacaatacccacttttcttgtcaaagtttctgagtaaaaaggaataaaaattagaagaattgaattaaaacccagtagcaaaacaactttatgtttgttggcagtacaatactaggtaggggttttctacgaatttctctactgaattattgcatctatacgactcattcagttatagctgagaaggctaagctaacactaaccaacaacgatgcggcacatgtgaaaattaaaatatatgctataactatatagtgcattattattttaattaaaattgttggtgccataattgccatttctctttctcaattcaaaattaaagccaatagaaaaggaagttaattgggtctaaattaccaaccagtggcaggtcggcgcagagctaatacatagttagcacaccaaaaccatcatcagaaacaaaattcacaattggaacttcatcactcaccatcacctatgaaactctctctctctctctctgattgtatttgtagggaccctagttatgaagaagtatttgtcacgtacttcacagacaatgggttatgggttatttcagtaacattgaacccactcgaagagtatggcatgaactcaaaagtgaaatatgtaaacactaattagtcaaaatttactgttcttggatcctgaatttagcccctagctggctttgaactacaaaagcttaaatacgagagccttgccagagactaggcacctttttctatcattaatcatcacttcttggattttatttctatatataccatctgtctcttattacatgtttatttaatttatgagtgttttgatttatctcaatatattttttatttaatacaattgtactttttttataaagatatatgtttaagatttaatttattatgctatcaattttaataaataattttttattttattttattattatatttatttttattaaattattaattttatcgtgatagagattatgataataagaaataaatcttttataattttaattaaaattgttcttgatagtaggattattatgaatatataagacattaataattcggataaatcaatatatatgtaatgatctttattgaataaagattaatatatcccatttattaaatcacatatatagatgaaatatatgtaaatgccatcattgaactgactcaattgataatgcataatagttaattttaccttgatatgttaataggaaattctaaaaaagatatataataatttcttttaacctgatactatcatagtaattaacaacttatttgttatattttaattttgaaaacctaatatcttaggacactagttaaatgaatattagatatagattaaatacttgtataattaatgactaatcaagaaaaaattcatcaactctatataatgagtttgagctctatgataagattaagacattggtcacaacaattgaaggaaagaaacaaagagtttcttaactcattcattgattaaatataatgtgttgacttattaatgtttgaaagtaatattatactctagagttaaccttgagttgtaaatgatggaatgaaatattatattattcttctattggtttttgaaactaaaaatgttatttcatgttatttggacgttaaggaatgttatattatgattattttactatcaatctagtattaacctacgaggtcacacacaaacaagtgtttcaatctttacaaaagaaaatactttatttgataattaaattataaaatttaatttaataaaataaatatttttgtaaaatattattatattctttgctaacaccaagactataattaatataaacaaaaatattattttatagatgtgaaagttgtccataaaataagagtaaaattttattgttacatatcatgtgattaattatcgtaattgttcatatgattatttgagaattatctttgttttgtatcaggaagcttcttaagataaaaatatacgagatacttttttattttcaaatataaagataaagagatgtaaaattattttaaataaaatctctcttgtttgaaaatacccaaatttatatctgagaaacatcttcgtgagagtaaagtatactagatacgaactagaaaatttcaagtctaattttagacctgaaaagtagaaagaagatttactctttatagtgagttccatttataagagttgatagcaaattgatcttggtgtgaagtctttatactacactagaaaattttaagtctaattttagacatgaaaaatagaaacaagatttgctctttatagtgagttccattcataagagttgatagcaaattgatcttggtggaaagtctctacactactaaagaaattttttattggtttaagaatgtgcatctgaatacataaatatattttatttattattgttgtatattttaaatgtaaaatagatcataattttctgttgcaaatgttagaaacatttatatgtgactatcactctttgctcccacagttttatgtctaaattttgtctttatttttttttaattttaccccaaaatttacaaaacattatagattttgttcccacctaaaaaaatcgtcacaattaatgaaaaacaatcacaaaattatcttaattgtgattgtttaagagaaaagtcgtcacaaaatcttaattatgacaatttttctaaggaaaatgcttaatagtacgaatgaagttttgtattgcaaacacgaatggcgtggcttcaattacacatcgacgctattcttcttattttgcgcttttccattgcttttagttttctttttcttcatttgttacaattccaatagaagactttcatcaagtctgtggtcatctttcacagttgcggtccaatgaaataatgtttagggcaagagcaatgtaagaagattttcaaagtcagaaaattttgctagcgattccaatggctatttcataaacaaaaaattcaaaatttgctgagattgtttcttcaggttttggtgggagataggaagtctcccacgattagcgggatatagaatcaaaatttgttgatttatctttcttttataattttaattattattttatgagaaataattacatgttacaaattcgtgtgtttggtacttaaattcttcgtgctatatagcattactttttgtcttaagtgaggaaaaaattcatgatattttataaattggatgacaaaattggttaaaacaaaattttggagactaaattcgcgacattgtaaaacttttggggaataaatataagtgagccttattattttaaaaatggatttcagtgtctttcttaagagagtaatatagttagcctctagaaataattgtttcttttcaatatctcatttgagaaaatatatcatgtgtattctctacttctaaaatcaatggtgtaatcgaaccatattttacttcttttattatcaaagtgatttgattaggattagaataactcgttgctcctaattatagaattgatcataaagtatgggaaaccagaataaaatagaatagtatacatctttgatggaaaagctagaaggctagcccacaagtatatgttaaacattaatttggatggttgagtgctacttccacccaatttactagaaaccctatacgtatattgtttatagattaaagagcttcatggcttttttaggcagcagatgggttaatgtttactaaataggaaatgtattaggatggcaatgacgatgcgaagacaaaaaaataatattcgattagtttaattttcatatttgtataagaaacaaatattattatggttaaatcactcggaactttgtactgtaattagaaaatattttgttgtgtattatgattgcattactttgctctcggtattagtaaaagatgtaattgtattttaatatcaattgttattggagtatgaatgtgagatgaaatttcatattaggtaggaataagaaagttgtgagaaaaaattcataaacctaagttttaaggttttgagttaaaatatattgttaaatttatttatataataatttgctcatgccatagaactaatgattcaacttggagactggtttggatgagtaaaatgaaggcgttgaatccatgaacattgaaatcctttaaatcgtaagttttcttgggagatgagttcatgcatggatgccagacaatgagtcccacaagtattgtggcaagtgcaaggtactggggttgataattcaactcgatgactgacttggatgagtaaaataaaggcgttgaattcatggatattgagatcccttgactaagtctttctcgggaatgagttcttgcatggaggccagagagtgagtctcacaattattgtagccatgcaagatactagagcatgttggttgcaatggttaggtgaatcgaggcaaccatgattaagctctaaaggatcatcattggatacttatgaaagagactcacacttaaaaaatatattgttgtgctataaagtcccatatcggtaggaatgagaaggttcaacatcatataagtgatgaaaaaaaaatatatttatgaattttaaggttttgagttaaaatgtggtgtcaaattcactatttacatttattaattatgtttaagatcattaaaaaattaaagtggtgcgttaaaatttattttaaaaattagagaaggaaatggtgacaagagatatacatttcaattgaagttgttaaaattagagttgagaacatgttttgtcattattttaagatgacatttgaatatacatttcttttaaattaatataattttattaagagaaagccaattcatcacaaggagtaccaaagaccagcttacacaaatattgttggtacaagagtattacaaaataacaactgaaacagaacacccctcacataaatccatacaaaataggatgcattaggaccaactacattgccctcaccataaaaaagaccaaagtaaatgttcttgacagaaccataaaatcgacaacttcaaactacacacactatagccagagagttaagcattacattacaagataaaatcacttccaagtgaatcaaaattgcttgaccaattgtccaattccacgctctgtgccaccaagctgatccaatgatatatgaaagacattgctgctgcaccggttgattcatcatcattaatccg

SEQ ID NO: 2 - DNA, 25 bp, Artificial Sequence
  Primer seqeunce
gaattttaagtcaacagacatgcac

SEQ ID NO: 3 - DNA, 25 bp, Artificial Sequence
  Primer sequence
tttcacggtaaaaattatcaccaac

SEQ ID NO: 4 - DNA, 25 bp, Artificial Sequence
  Primer sequence
gcagggaggcaacaaattaacaaac

SEQ ID NO: 5 - DNA, 27 bp, Artificial Sequence
  Primer sequence
tgtttcacaatctttcttctcacacac

SEQ ID NO: 6 - DNA, 25 bp, Artificial Sequence
  Primer sequence
ggaggatcgcgaccatcatactttc

SEQ ID NO: 7 - DNA, 25 bp, Artificial Sequence
  Primer sequence
ttccacaccctcacacatgattgta

SEQ ID NO: 8 - DNA, 24 bp, Artificial Sequence
  Primer sequence
tgtcgcgttaaattcgtatgtttg

SEQ ID NO: 9 - DNA, 26 bp, Artificial Sequence
  Primer sequence
tcaaattaaaggcatgaggattttgg

SEQ ID NO: 10 - DNA, 26 bp, Artificial Sequence
  Primer sequence
cccacatcattttgacttaacactag

SEQ ID NO: 11 - DNA, 26 bp, Artificial Sequence
  Primer sequence
tcttcttagttcttagattctcgcac

SEQ ID NO: 12 - DNA, 28 bp, Artificial Sequence
  Primer sequence
ccttttatgtctcttccgtttgaaaagc

SEQ ID NO: 13 - DNA, 26 bp, Artificial Sequence
  Primer sequence
aagtatgatggtcgcgatcctcctcc

SEQ ID NO: 14 - DNA, 1611 bp, Artificial
  Glycine max
  misc_feature (1)..(1611): CDS  Glyma16g30020
atggcattggctcctactccaacagttgtctttggctcaatagcctttgcagttttctgggttctagcagttttcccatgtgtgccttttctacccattgggagaactgcagggtccctactaggtgcaatgtttatggtcatattcaaagttcttaatccagatcaagcttttgctgcaattgatctcccaattcttggtcttctttttgggacaatggttgttactgtttttcttgaaagagcagacatgttcaagtacttggggaaattgctctcttggaaaagccaaggaccaaaggacttactctgtagaatttgtttaatttctgctatatcaagtgcttttttcaccaatgacacatcttgtgttgtattgactgaatttgtgttgaaaatagcaaggcaacataacctcccaccttaccctttccttcttgcactagcttcaagtgctaatattggatcctcagcaaccccaattgggaacccccagaatctagttatagctattcaaggtaaaatatcatttgggagctttctcactggtattcttccagctatgcttgtaggagttgtggtgaatgttgtaattcttatagccatgtattggaaggtgttaactattcataaggatgaagaggatccaatttcagaagttgctgaagaggagtttgtttcccatcagttttctccagccacaatgtcacattgtgcatcctttaattctcatgaatgcaatgacagtctagaacctactaatggtcttcaaaacccttctcaagtacatcctatcagaaaccaaacaactccaagtgtaactgaagttcagatggttcttagtagcacaaaggattccacaacaaatgcatccaagatggggataaatgatgcaaaggaggaaactaatccttcaaaagttgttgcaatagtagtagataaacctatagaagcacatgttatgcactcttcacaaggaaaggtggactatttgagaaaaaaatggaaaaggatagtgtggaaatcttgtgtttatgcaatcacgttgataatggtgattgcaatgcttcttggtgcaaatatggcatgggctgcaattgcagctgcaataactttggtggttcttgatttcaaagatgcagggccaagcatagacaaggtctcttattcactgttgatattcttttgtggaatgtttatcacagtagatggattcaagaaaactggaattccaggtgctctttgggacttaatggagccttattctcgaatagatcatgctagtggaatagctatactggctatagttatacttgtcctatcaaatttggcttcaaatgtaccaactgttctattgcttggagcacgagttgcagcctcagctgctactgtttccaaagaagatgagaagagagcatggctaatcttggcttgggtgagcaccatagcagggaacttttcactattaggatcagctgcaaacttggtagtgtgtgaacaagctcgcaaagctccaaacattggatacacgttaaccttttggacccacctaaaatttggccttccttccactcttatagtcactgctattgggttgacactcataaaatga

SEQ ID NO: 15 - protein, 536 aa, Artificial
  Glycine max
  MISC_FEATURE (1)..(536): Glyma16g30020 protein
MALAPTPTVVFGSIAFAVFWVLAVFPCVPFLPIGRTAGSLLGAMFMVIFKVLNPDQAFAAIDLPILGLLFGTMVVTVFLERADMFKYLGKLLSWKSQGPKDLLCRICLISAISSAFFTNDTSCVVLTEFVLKIARQHNLPPYPFLLALASSANIGSSATPIGNPQNLVIAIQGKISFGSFLTGILPAMLVGVVVNVVILIAMYWKVLTIHKDEEDPISEVAEEEFVSHQFSPATMSHCASFNSHECNDSLEPTNGLQNPSQVHPIRNQTTPSVTEVQMVLSSTKDSTTNASKMGINDAKEETNPSKVVAIVVDKPIEAHVMHSSQGKVDYLRKKWKRIVWKSCVYAITLIMVIAMLLGANMAWAAIAAAITLVVLDFKDAGPSIDKVSYSLLIFFCGMFITVDGFKKTGIPGALWDLMEPYSRIDHASGIAILAIVILVLSNLASNVPTVLLLGARVAASAATVSKEDEKRAWLILAWVSTIAGNFSLLGSAANLVVCEQARKAPNIGYTLTFWTHLKFGLPSTLIVTAIGLTLIK

SEQ ID NO: 16 - DNA, 1617 bp, Artificial
  Glycine max
  misc_feature (1)..(1617): CDS Glyma16g30000
atggctttagctcctacttcaaaagttgtccttggttcaatagcctttgctatcttctgggtactagcagttttcccagctgtgccttttctacccattgggagaactgcagggtccctgcttggtgccatgcttatggtcatattcaaagttcttagtccagatcaagcttatgctgcaattgatctcccaattcttggtcttctttttgggactatggctgtcactatttttcttgaaagagcaaacatgttcaagtacttggggaaattgctctcttggaaaagtagaggaccaaaggacttactttgtagaatctgtctcatttctgctatctcaagtgcttttttcaccaatgacacttcttgcattgtgttgactgaatttgtgttgaaaattgcaaggcaacataacctcccaccttaccctttccttcttgcacttgctacaagtgctaatattggatcctcagcaaccccaattgggaacccccagaatttggttatagctattcaaggtaaaatatcatttgggaggtttctgataggtattcttccagctatgcttgtaggagttgtggtgaatgttgtatttcttatagccatgtattggaaggtactatcttgtcctaaggatgaagaggatccagtttcagaagtggtagtggatgaggaggttgtttctcatcagttttctccagccagaatgtctcattttacatcctttaattctcaagaatgcaatggcagtgtagaacttgctaatagtattcaaaactcttcccaagttcatgttatgagagaccaatcaactccaagtgaaagtgaagttcagatggttcatagtggcacaaaggatttcacaacaaactcaaatgcatccaaggaagggacaaatgatacaaaggaggaaactaatccttcaaaaaatgttgcaatagtagtggataaacctattgaagcacatgttatactctcttcaggagaaaaggactatatgaacaaaaaatggaagagggtactgtggaaatcttgtgtttatgcaatcacactagtaatgttgattgcaatgctcattggtttgaatatggcatggactgcaattgcagctgcaataactttggtggttcttgatttcaaagatgcagggccaagcttagacaaggtctcatattcacttttggtattcttctgtggaatgtttatcacagtagagggctttaagtccactggaattcctagtgctatgtgggacttaatggagccctattctcgaatagatcatgctagtggaacagctatacttgctatagttatacttgtcctatcaaatttggcttcaaacgtaccaacagttctattgcttggagcaagagttgcagcctcagctgctgcaatttccaaaggagatgaggagagggcatggctaatcttagcttgggttagcactatagcagggaacttttcactattaggatcagctgccaacttgatagtgtgtgaacaagctcgtcgagctccaaaccttggatacacattaaccttttggactcatctaaaagttggccttccttcaactcttatagtcactgctattgggttgacactcataaaatga

SEQ ID NO: 17 - protein, 538 aa, Artificial
  Glycine max
  MISC_FEATURE (1)..(538): Glyma16g30000 protein
MALAPTSKVVLGSIAFAIFWVLAVFPAVPFLPIGRTAGSLLGAMLMVIFKVLSPDQAYAAIDLPILGLLFGTMAVTIFLERANMFKYLGKLLSWKSRGPKDLLCRICLISAISSAFFTNDTSCIVLTEFVLKIARQHNLPPYPFLLALATSANIGSSATPIGNPQNLVIAIQGKISFGRFLIGILPAMLVGVVVNVVFLIAMYWKVLSCPKDEEDPVSEVVVDEEVVSHQFSPARMSHFTSFNSQECNGSVELANSIQNSSQVHVMRDQSTPSESEVQMVHSGTKDFTTNSNASKEGTNDTKEETNPSKNVAIVVDKPIEAHVILSSGEKDYMNKKWKRVLWKSCVYAITLVMLIAMLIGLNMAWTAIAAAITLVVLDFKDAGPSLDKVSYSLLVFFCGMFITVEGFKSTGIPSAMWDLMEPYSRIDHASGTAILAIVILVLSNLASNVPTVLLLGARVAASAAAISKGDEERAWLILAWVSTIAGNFSLLGSAANLIVCEQARRAPNLGYTLTFWTHLKVGLPSTLIVTAIGLTLIK

SEQ ID NO: 18 - DNA, 2563 bp, Artificial
  Glycine max
  misc_feature (1)..(2563): HiSil native promoter (from chromosome 16)
agatgacttatatgcaaagtaaaatattatattttactaaatgaagattatttaaatgaatatattagaagttgtttttatttcaacttttaagagagtttatttttgtttcaacttaatttatttattatagttggtgataatttttaccgtgaaaaaaaatagtatatgaagagaaagtgtgtgagaagaaagattgtgaaacaacagtcactttgttgatagaaaaatgattttgtgtaagaatgttatcattttttgtaacgtattcggttttatagggtgatacactatttgggaagagttacactctttaatcatttttgtgatagtgaaatacttttgaaatgattatgtgaatgtaagcaaaaaatgtcgcgttaaattcgtatgtttgttattatttttcttgtggtataatttttattgtgtttttataatctttcgtgtgaagattgattatccaacacattttaattataggtatgtcctacatttgtctctatccaaaatcctcatgcctttaatttgatatgaatacatgtttcaacagcttcttacaaacatatatataatcttataaatatattctttattattaattaaaatttataaatttcacttcttatttaaaaaattaatatcactcataattttataattttattaataaaaaatatattaagaaaattgtgttaaaaaatatctcaaataataatgattggaagctattacaaaagttgccgcatatgacttttataatccagagtgtccgtataaatagagggtccactttcaccaagtagtaccaagttaagttgcctcttatgacttttatactcaaagagtgtacatgaaaagtgcaaaaagagggtcacttttcgccaagtggtattacacagttgccgcttatgacttatcctttctcaccaggttgctagcatggaagaagtgtacttaattagtgtgcacatatataaatagagggtcaccttaatttctcattctcacaccaagtagtagtgtcttgacaagttttcagctctgttgcaattccctcttctaccattttgctagcaaactcacatttttatactcaatccaattcagaaaaaaactcttacaaaagttcatatagcttttcatggagccttctagttattaaggtaagaatagcgagtaaagtgtgtgcatgataagtgtctgtgttgtttttctattccagctcttttgaattgagtgttatatgtatattatataatatctttgcttctaattggatcaattttgttttccaatataattctggctttcatgggtggttttgatttactaatagcgtgtttatggaaactcgtttaagaaataacgtttgggatgtgaaagctataagtattagtttctgaaaatcatatctaaaacgtggaaaatcacatcccaaacacgctataaaaataacatagaaacttggtttttctgaaagaagtagttgaaaccgtccacttatattttctttgtgtacttaatagatttcatgcatgcattttgagagttcaataaaatccttattgtagtcccattttgctggaatgcacggcatgtactttattctatatatatttactgtgtcagtactccattaaatgatgcatatacacatgctaggtacccatttgagatattgaatatggataaatagccttttaaaaaatgaaaaagaaaagaaactggtatatggagcttgtgtacggcttatatgtaccagtttttttttttcttttaccaaaaagctgatacgctgctcagccagctcaggtatatctttaatgctgttggaccatacaaatttgataccaattagcattgttttgttgacaaaacaaaaaggtcattttcctccaataagatatcaacacagtggcccgcgatgttgactgtgtgttgaaaaagttattattactattatgttgtgattcctcaattattggtattccttgtttgttggttggctataaccattttttttatattataggttatttatattaatttatgagcttgttaatttattatcctaattaagttgtttttcaagataattgcttcctttaatttttatgctatgcttggaaagtcatgtgattttatgtttactacactgctgtcatgttttatagtacatcaaattcaaatgtcttgtccatatttaattgatttatctatttgcaaaaatttaattaacccacagtatacgatacctgtattcatgtgatgtagcagacctctgtcaaataccagaaacaatatattcatactccgatccacgttcctgcttgatcattaatattcaataataatgattcacttaattaatgtctcaacgtagtagattgaataagaagaggaatctaatagattggtttttcatgcactcttacaaagttactaatcaattggctttccatgttcaggaaattgtaccaaacaaaattctattgtgttcgcctagaagtggaggcttgaattaacatttgtttggaaattgttgcttgtttaaccacaa

SEQ ID NO: 19 - DNA, 3294 bp, Artificial Sequence
  Williams upstream sequence of Glyma16g30000 (from phytozome) Williams 30000 promoter
  misc_feature (3292)..(3294): ATG start codon
tactgctatgataattggatttcttgagtatattgacgagaatttgattctttattcatacacatagaaaatactttactaattaagaaagaaaaaaaaatattttaataatttctacgtcttaaaaaattagtctcagggtctttttaattgtggtggtatcttgcttttagcaaaaagaaacaatggtaacaatataattatcaactggattgcaattattagtatagttttgattcttttttattggtaatgcttgttggccagctaacatttttttcttaatattttgactttgatttctatgagtttgttcatgttttatactccgttattgtcatagtaatttataaatattttacttcatttatgttttagaatctatatcctttcttttaattgaatagcaggatctagttatacaaactgaaaagaaaagaacaatcattatcaatgggataaaaaatattcctttcttgtctaatatatcatattaactatttaatagtggaaataaattccaatcatatgttttgtactatgtcgaaatttatgtattttagtatatcaaatactcatttcttgtatggattttttttatatataaaaaaaaaattatacccatacaacgtactaatgtaataggttctcaaaggcttcccttgcgtgaatacttcaaaaatatttcaaccttttgatggaagcaagacggagagataagattgaatgtaaatacaaatatcacatcgatgttaaaatattaattcatcctatccaaattatcattatgttaatgttttgtggagagtatcaattgcaacatggtatcatgtggtagttatttcaaaattacttattaaatataaagtggtttgaagtgacgtaagtgcaagtatatgtgtgagtggcattttcaattaaaaagacagtggtacgtcctagatttaataaaaatatttgtcagtattaaaaaaaaatctcgtgctttttatttgattgctgaagaaaaaaattaacaattatgtagtataagttataaaaaaaatcatattctccctcaacaagaaattatagttaataagagtttcaaaaaagttactataatgatcaaccagcttattttatgtgataatttattattaaattatataaaattattttatattatcagtgtataatttatttttaaaaaaaaaatacataaatagtttattgtgtcagataaattctgattggaagctattaaagttgccctttagaacttttatatattttccagtgtgcacatatataaaagagggtcacctttcacctagtggtatgaagtggaagtgtcttgaacaatagtcttcagctctgaggatgctgcaattctcttccaccattttccaaacaaattaaaatgtttctgaatccaatttggaaaccaaaaagttcgtagcttttcatagagctttcaagtaattagccccgtgaaatatttttctttttacgcaagatgacaccacgggccttctaactgaaacaagcaataataataacaggccaaggaaaaactcagcagcattctgttagaaggaaaacacttatctctattagcatatttgtctccattaatctcttacttcagtcctctatcaggtaagagtaggacgtaaaatgtgtgatagatgtttgtgttattgttttccttttccagttctgttgaattaaatgctgtattatatgatatccttgctgctaatatgcttaactgaatgagttttttacgtatgctctacgtgttttccaattcttgctttttctaaaagaatttcttgaacctcccctcatatttcctttgtgaacttaccagatttcatgcattttgagagtcatagaatttcttattatagttaggccgattctgctagaatctagctactgcatgcatgtactttgttcaatatgtgtcagtgatccataagtaatgcataatacacatgttagtccatatgggatctggaatttgatcaataatatttgcagatgatttcataacagactgatatacgtgcaacgtaattgttagaatagatttcgataccaccttaattttgaatttaggatctaacttaacggatggaaactatcttttatttatatgttctattttaccgtatctttattttatgtgaaatctccaacattctacctgcaatcacagtatattttttatacgattttataagtaatggttacaaaaggaaactagtacccaacttgtgtacggtttattagtaccaatttttcttttaaccaaaaagctgatatgcaactctgctgtagtggtatgtctttgatacggtttggccgtatagttgtgacaagaactaggcatttttgtttgggaaaaaagtgattattgcctttttatgctaaaagaatatgtttttctttatattttccaaaaaaaatatttacttgtattgtgtaattagtcgattatctgaaagtcgtccataatatgtatttgcttagacatccaagaagagtgacgcacgttcacttgatacaaatataattagcttttccatcagtcgtacagtttgaacgcaaaaaaagattaaaaagtgcctaagaaattctgacattaaaaatctatcagaaattactcttacaaaatcacagttaactttcaaaaagttgatctaaaccatacaagtatttttttttaagtatactattttgatatttggtaaaaaaaaaaaaaaaacttaccgattttttatattgttgtgattctctattttgctattgcttggtttgttggtgggtcatcttttttttttttttttggtttatgagcttggtacgctattatcctccagatatttttcacgataattacaactttcatgttttatgctatgcttgaaaattcaggtgattttattttttacaaagttgtcatgttttgtaatatcaaattcaaatgtcttatccatatttaattacgaaaaaattatattaacacaaagtataggcctaccggtatcatgcaacgtagtttagctatgtcatataccatgaacttatctactttaaatgctcttcaataataatgattcacttaattcatgtctcaaagtcaaaggtttgattttcttgcattcttactaagttgctaaccaattggtttttcatgttcaggaaattcctaccaaacaaaattcatttgtgttggcctagaggtgaagtttatagcatttgctttgaagtttggaaattgttgcttgttcaatcacaacaatg

SEQ ID NO: 20 - DNA, 3451 bp, Artificial Sequence
  Williams up-stream sequence of Glyma16g30020; Williams 30020 promoter
  misc_feature (3449)..(3451): ATG start codon
ataattatatttgaggtgaaaaattatatgcttttgcttagtaactatagatcattcaaatctttacccaaaaaaaaaaagatcattcaaatattatgttttatactatgttggaaatttatgtaacttttttatgtttgaaatgaaatcttaatcacatacttaattagattaatcacatgagattatgtttagaagatttcaggatgagttttcgatttagttctaaaaatttaacaataatatttttagtgatttattgacttgcaggtatagatataaactaatacagaaatgagaatcagaagttgttacccgtgtaaatgccggtgctggtacatgtctacgcacaataccctacccagaccttatttacaaatgatcctattcaaattaagagtaactcgaactcgtcaaatcctaattatcatcatataaatatctggtgaaaagtgctttgtaatgtatagttatttcaaaaattgataaagtggggtgacttgacctaagtcataatgaaaagtgctttgtcatgtagtagttaattatttcaaaattgataaagtggagtgacttgacctaactaagtatgtgattaaaaacttgattttttaattagtataaatgaaaatatttattgtaagagactagttttttaaataaatattaatattttaaaaagattaatcttaattttcaaaaaacaatatctgaataaatagatatatgctccaatatatatgcatgacgctcaaaaccgcgcagggaggcaacaaattaacaaacaacagtagctagtattttaacattatagaattttaagtcaacagacatgcacattaaaaattgaattttggaaattaaatttttattattaagatttagatgacttatatgcaaagtaaaatattatattttactaaatgaagattatttaaatgaatatattagaagttgtttttatttcaacttttaagagagtttatttttgtttcaacttaatttatttattatagttggtgataatttttaccgtgaaaaaaaatagtatatgaagagaaagtgtgtgagaagaaagattgtgaaacaacagtcactttgttgatagaaaaatgattttgtgtaagaatgttatcattttttgtaacgtattcggttttatagggtgatacactatttgggaagagttacactctttaatcatttttgtgatagtgaaatacttttgaaatgattatgtgaatgtaagcaaaaaatgtcgcgttaaattcgtatgtttgttattatttttcttgtggtataatttttattgtgtttttataatctttcgtgtgaagattgattatccaacacattttaattataggtatgtcctacatttgtctctatccaaaatcctcatgcctttaatttgatatgaatacatgtttcaacagcttcttacaaacatatatataatcttataaatatattctttattattaattaaaatttataaatttcacttcttatttaaaaaattaatatcactcataattttataattttattaataaaaaatatattaagaaaaatgtgttgaaaaatatctcaaataataatgattggaagctattactaaagttgccgcatatgacttttataatccagagtgtccgtataaatagagggtccactttcaccaagtagtaccaagttaagttgcctcttatgacttttatactcaaagagtgtacatgaaaagtgcaaagagagggtcacttttcgccaagtggtattacacagttgccgcttatgacttatcctttctcaccaggttgctagcatggaagaagtgtacttaattagtgtgcacaaatataaatagagggtcaccttaatttctcattctcacaccaagtattagtgtcttgacaagttttcagctctgttgcaattccctcttccaccattttgctagcaaactcacatttttatactcaatccaattcagaaaaaaactcttacaaaagttcatatagcttttcatggagccttcaagttattaaggtaagaatagcgagtaaagtgtgtgcatgataagtgtctgtgttgtttttctattccagctcttttgaattaattgttatatgtatattatataatatctttgcttctaattggatcaattttgttttccaatataattctggctttcatgggtggttttgatttactaatagcgtgtttatggaaactcgtttaagaaataacgtttgggatgtgaaagctataagtattagtttctgaaaatcatatctaaaacgtggaaaatcacatcccaaacacgctataaaaataacatagaaacttggtttttctgaaagaagtggttgaaaccgtccactaatattatctttgtgtacttaatagatttcatgcatgcattttgagagttcaataaaatccttattgtagtcccattttgctggaatgcacggcatgtactttattctatatatatttactgtgtcagtactccattaaatgatgcatatacacatgctaggtacccatttgagatattgaatatggataaatagccttttaaaaaatgaaaaagaaaagaaactggtatatggagcttgtgtacggcttatatgtaccagtttttttttttcttttaccaaaaagctgatacgctgctcagccagctcaggtatatctttaatgctgttggaccatacaaatttgataccaattagcattgttttgttgacaaaacaaaaaggtcattttcctccaataagatatcaacacagtggcccgcgatgttgactgtgtgttgaaaaagtgattattactattatgttgtgattcctcaattattggtattccttgtttgttggttggctataaccattttttttatattatagattatttatattaatttatgagcttgttaatttattatcctaattaagttgtttttcaagataattgcttcctttaatttttatgctatgcttggaaagtcatgtgattttatgtttaatacactgctggcatgttttatagtacatcaaattcaaatgtcttgtccatatttaatttatttatctgtttgcaaaaatttaattaacccacagtatacgatacctgtattcatgtgatgtagcagacctctgtcaaataccataaacaatatattcatactccgatccacgttcccgcttgatcattaatattcaataataatgattcacttaattcatgtctcaaagtagtagattgaataagaagaggaatataatagattggtttttcatgcactcttacaaagttactaatcaattggctttccatgttcaggaaattgtaccaaacaaaattctattgtgttcgcctagaagtggaggcttgaattaacatttgtttggaaattgttgcttgtttaaccacaacaatg

SEQ ID NO: 21 - DNA, 1617 bp, Artificial Sequence
  Glyma16g30000.2 CDS Williams82
atggctttagctcctacttcaaaagttgtccttggttcaatagcctttgctatcttctgggtactagcagttttcccagctgtgccttttctacccattgggagaactgcagggtccctgcttggtgccatgcttatggtcatattcaaagttcttagtccagatcaagcttatgctgcaattgatctcccaattcttggtcttctttttgggactatggctgtcactatttttcttgaaagagcaaacatgttcaagtacttggggaaattgctctcttggaaaagtagaggaccaaaggacttactttgtagaatctgtctcatttctgctatctcaagtgcttttttcaccaatgacacttcttgcattgtgttgactgaatttgtgttgaaaattgcaaggcaacataacctcccaccttaccctttccttcttgcacttgctacaagtgctaatattggatcctcagcaaccccaattgggaacccccagaatttggttatagctattcaaggtaaaatatcatttgggaggtttctgataggtattcttccagctatgcttgtaggagttgtggtgaatgttgtatttcttatagccatgtattggaaggtactatcttgtcctaaggatgaagaggatccagtttcagaagttgtagtggatgaggaggttgtttctcatcagttttctccagccagaatgtctcattttacatcctttaattctcaagaatgcaatggcagtgtagaacttgctaatagtattcaaaactcttcccaagttcatgttatgagagaccaatcaactccaagtgaaagtgaagttcagatggttcatagtggcacaaaggatttcacaacaaactcaaatgcatccaaggaagggacaaatgatacaaaggaggaaactaatccttcaaaaaatgttgcaatagtagtggataaacctattgaagcacttgttatactctcttcaggagaaaaggactatatgaacaaaaaatggaagagggtactgtggaaatcttgtgtttatgcaatcacactagtaatgttgattgcaatgctcattggtttgaatatggcatggactgcaattgcagctgcaataactttggtggttcttgatttcaaagatgcagggccaagcttagacaaggtctcatattcacttttggtattcttctgtggaatgtttatcacagtagagggctttaagtccactggaattcctagtgctatgtgggacttaatggagccctattctcgaatagatcatgctagtgaaacagctatacttgctatagttatacttgtcctatcaaatttggcttcaaacgtaccaacagttctattgcttggagcaagagttgcagcctcagctgctgcaatttccaaaggagatgaggagagggcatggctaatcttagcttgggttagcactatagcagggaacttttcactattaggatcagctgccaacttgatagtgtgtgaacaagctcgtcgagctccaaaccttggatacacattaaccttttggactcatctaaaagttggccttccttcaactcttatagtcactgctattgggttgacactcataaaatga

SEQ ID NO: 22 - protein, 538 aa, Artificial Sequence
  Williams Glyma16g30000.2
MALAPTSKVVLGSIAFAIFWVLAVFPAVPFLPIGRTAGSLLGAMLMVIFKVLSPDQAYAAIDLPILGLLFGTMAVTIFLERANMFKYLGKLLSWKSRGPKDLLCRICLISAISSAFFTNDTSCIVLTEFVLKIARQHNLPPYPFLLALATSANIGSSATPIGNPQNLVIAIQGKISFGRFLIGILPAMLVGVVVNVVFLIAMYWKVLSCPKDEEDPVSEVVVDEEVVSHQFSPARMSHFTSFNSQECNGSVELANSIQNSSQVHVMRDQSTPSESEVQMVHSGTKDFTTNSNASKEGTNDTKEETNPSKNVAIVVDKPIEALVILSSGEKDYMNKKWKRVLWKSCVYAITLVMLIAMLIGLNMAWTAIAAAITLVVLDFKDAGPSLDKVSYSLLVFFCGMFITVEGFKSTGIPSAMWDLMEPYSRIDHASETAILAIVILVLSNLASNVPTVLLLGARVAASAAAISKGDEERAWLILAWVSTIAGNFSLLGSAANLIVCEQARRAPNLGYTLTFWTHLKVGLPSTLIVTAIGLTLIK

SEQ ID NO: 23 - DNA, 1611 bp, Artificial Sequence
  Williams Glyma16g30020 CDS
atggcattggctcttactccaacagttgtctttggctcaatagcctttgcagttttctgggttctagcagttttcccatgtgtgccttttctacccattgggagaactgcagggtccctactaggtgcaatgtttatggtcatattcaaagttcttaatccagatcaagcttttgctgcaattgatctcccaattcttggtcttctttttgggacaatggttgttactgtttttcttgaaagagcagacatgttcaagtacttggggaaattgctctcttggaaaagccaaggaccaaaggacttactctgtagaatttgtttaatttcagctatatcaagtgcctttttcaccaatgacacatcttgtgttgtattgactgaatttgtgttgaaaatagcaaggcaacataacctcccaccttaccctttccttcttgcactagcttcaagtgctaatattggatcctcagcaaccccaattgggaacccccagaatctagttatagctattcaaggtaaaatatcatttgggagctttctcactggtattcttccagctatgcttgtaggagttgtggtgaatgttgtaattcttatagccatgtattggaaggtgttaactattcataaggatgaagaggatccaatttcagaagttgctgaagaggagtttgtttcccatcagttttctccagccacaatgtcacattgtgcatcctttaattctcatgaatgcaatgacagtctagaacctactaatggtcttcaaaacccttctcaagtacatcctatcagaaaccaaacaactccaagtgtaactgaagttcagatggttcttagtagcacaaaggattccacaacaaatgcatccaagatggggacaaatgatgcaaaggaggaaactaatccttcaaaagttgttgcaatagtagtagataaacctatagaagcacatgttatgcactcttcacaaggaaaggtggactatttgagaaaaaaatggaaaaggatagtgtggaaatcttgtgtttatgcaatcacgttgataatggtgattgcaatgcttcttggtgcaaatatggcatgggctgcaattgcagctgcaataactttggtggttcttgatttcaaagatgcagggccaagcatagacaaggtctcttattcactgttgatattcttttgtggaatgtttatcacagtagatggattcaagaaaactggaattccaggtgctctttgggacttaatggagccttattctcgaatagatcatgctagtggaatagctatactggctatagttatacttcttctatcaaatttggcttcaaatgtaccaactgttctattgcttggagcacgagttgcagcctcagctgctactgtttccaaagaagatgagaagagagcatggctaatcttggcttgggtgagcaccatagcagggaacttttcactattaggatcagctgcaaacttggtagtgtgtgaacaagctcgcaaagctccaaacattggatacacgttaaccttttggacccacctaaaatttggccttccttccactcttatagtcactgctattgggttgacactcataaaatga

SEQ ID NO: 24 - protein, 536 aa, Artificial Sequence
  Williams > Glyma16g30020
MALALTPTVVFGSIAFAVFWVLAVFPCVPFLPIGRTAGSLLGAMFMVIFKVLNPDQAFAAIDLPILGLLFGTMVVTVFLERADMFKYLGKLLSWKSQGPKDLLCRICLISAISSAFFTNDTSCVVLTEFVLKIARQHNLPPYPFLLALASSANIGSSATPIGNPQNLVIAIQGKISFGSFLTGILPAMLVGVVVNVVILIAMYWKVLTIHKDEEDPISEVAEEEFVSHQFSPATMSHCASFNSHECNDSLEPTNGLQNPSQVHPIRNQTTPSVTEVQMVLSSTKDSTTNASKMGTNDAKEETNPSKVVAIVVDKPIEAHVMHSSQGKVDYLRKKWKRIVWKSCVYAITLIMVIAMLLGANMAWAAIAAAITLVVLDFKDAGPSIDKVSYSLLIFFCGMFITVDGFKKTGIPGALWDLMEPYSRIDHASGIAILAIVILLLSNLASNVPTVLLLGARVAASAATVSKEDEKRAWLILAWVSTIAGNFSLLGSAANLVVCEQARKAPNIGYTLTFWTHLKFGLPSTLIVTAIGLTLIK

SEQ ID NO: 25 - DNA, 3253 bp, Artificial Sequence
  Hikmok_Glyma16g30000-upstream-sanger-seq; Hikmok 30000 promoter
  misc_feature (3251)..(3253): ATG start codon
tactgctatgataattggatttcttgagtatattgacgagaatttgattctttattcatacacatagaaaataactaagaaagaaaaaaattattttaataatttctacgtcttaaaaaattagtctcagggtccttttaattgtggtggtatcttgcttttagcaaaaagaaacagtggtaacaatataattatcaattggattgcaattattagtatagttttgattcttttttattggtaatgcttggtttgttggccagctaacatttttttcttaatattttgactttgatttctatgagtttgttcatgttttatactccgtttattgtcatagtaatttataaatattttacttcatttatgttttagaatctatatcctttcttttaattgaatagcaggatctagttatacaaactgaaaagaaaagaacaatcattatcaatgggataaaaaatattcctttcttgtctaatatatcctattaactatttaatagtggaaataaattccaatcatatgttttgtactatgtcgaaatttatgtattttatcttttgtatatttttccatgttttagtatatcaaatactcatttcttgtatggattttttttataaaaaaaaaaaatgatacccatacaacgtactaatgtaataggttctcaaaggcttcccttgcgtgaatacttcaaaaatatttcaaccttttgatggaagcaagacggagagataagattgaatgtaaatacaaatatcacatcgatgttaaaatattaattcatcctatccaaattatcattatgttaatgttttgtggagagtaccaattgcaacatggtatcatgtagtagttatttcaaaattacttattaaatataaagtggtgtgaagtgacgtaagtgcaagtatatgtgtgagtggcattttcaattaaaaagacagtggtacgtcctagatttaataaaaatatatgtcagtattaaaaaaaatctcgtgctttttatttgattgctgaagaaaaaaattagcaattatgtagtataagttaaaaaaaaagtcatattctccctcaacaagaaattatagttaataagagtttcaaaaaagttactataatgatcaaccagcttattttatgtgataatttattattaaattatataaaatttattgtgtcagataaattctgattggaagctattaaagttgccctttagaacttttatatattttccagtgtgcacatatacaaaagagggtcacctttcacctagtggtatgaagtggaagtgtcttgaacaatagtcttcagaggatgctgcaattctcttccaccatttcccaaacaaattaaaatgtttctgaatccaatttggaaaccaaaaagttcatagcttttcatagagctttcaagtaattagccccgtgaaatatttttctttttacgcaagatgacaccacgggccttctaactgaaacaagcaataataataacaggccaaggaaaaactcagcagcattctgttagaaggaaaacacttatctctattagcatatttctctccattaatctcttacttcagtcctctatcaggtaagagtaggacgtaaaatgtgtgatagatgtttgtgttattgttttccttttccagttctgttgaattaaatgctgtattatatgatatccttgctgctaatatgcttaactgaatgagttttttacgtatgctctacgtgttttccaattcttgctttttctaaaagaatttcttgaacctcccctcatatttcctttgtgaacttaccagatttcatgcattttgagagtcatagaatttcttattatagttaggccgattctgctagaatctagctactgcatgcatgtactttgttcaatatgtgtcagtgatccataagtaatgcataatacacatgttagtccatatgggatctggaatttgatcaataatatttgcagatgatttcataacagactgatatacgtgcaacgtaattgttagaatagatttcgataccaccttaattttgaatttaggatctaacttaacggatggaaactatcttttatttatatgttctattttaccgtatctttattttatgtgaaatctccaacattctacctgcaatcacagtatattttttatacgattttataagtaatggttacaaaaggaaactagtacccaacttgtgtacggtttattagtaccaatttttcttttaaccaaaaagctgatatgcaactctgctgtagtggtatgtctttgatacggtttggccgtatagttgtgacaagaactaggcatttttgtttgggaaaaaagtgattattgcctttttatgctaaaagaatatgtttttctttatattttccaaaaaaaatatttacttgtattgtgtaattagtcgattatctgaaagtcgtccataacatgtatttgcttagacatccaagaagagtgacgcacgttcacttgatacaaatataattagcttttccatcagtcgtacagtttgaacgcaaaaaaagattaaaaagtgcctaagaaattctgacattaaaaatctatcagaaattactcttacaaaatcacagttaactttcaaaaagttgatctaaaccatacaagtatttttttttaagtatactattttgatatttggtaaaaaaaaaaaaaacttaccgattttttatattgttgtgattctctattttgctattgcttggtttgttggtgggtcatcttttttttttttttttggtttatgagcttggtacgctattatcctccagatatttttcacgataattacaactttcatgttttatgctatgcttgaaaattcaggtgattttattttttacaaagttgtcatgttttgtaatatcaaattcaaatgtcttatccatatttaattacgaaaaaattatattaacacaaagtataggcctaccggtatcatgcaacgtagtttagctatgtcatataccatgaacttatctactttaactgctcttcaataataatgattcacttaattcatgtctcaaagtcaaaggtttgattttcttgcattcttactaagttgctaaccaattggtttttcatgttcaggaaattcctaccaaacaaaattcatttgtgttggcctagaggtgaagtttatagcatttgctttgaagtttggaaattgttgcttgttcaatcacaacaatg

SEQ ID NO: 26 - DNA, 3442 bp, Artificial Sequence
  Hikmok_sorip up-stream sequence of Glyma16g30020 (Sanger's sequencing); Hikmok 30020 promoter
  misc_feature (3440)..(3442): ATG start codon
ataattatatttgaggtgaaaaattatatgcttttgcttagtaactatagatcattcaaatctttacccaaaaaaaaagatcattcaaatattatgttttatactatgttggaaatttatgtaacttttttatgtttgaaatgaagatcttaatcacatacttaattagattaatcacatgagattatgtttagaagatttcaggatgagttttcgatttagttctaaaaatttaacaataatatttttagtgatttattgacttgcaggtatagatataaactaatacagaaatgagaatcagaagttgttacccgtgtaaatgccggtgctggtacatgtctacgcacaataccctacccagaccttatttacaaatgatcctattcaaattaagagtaactcgaactcgtcaaatcctaattatcatcatataaatatctggtgaaaagtgctttgtaatgtatagttatttcaaaaattgataaagtggggtgacttgacctaagtcataatgaaaagtgctttgtcatgtagtagttaattatttcaaaattgataaagtggagtgacttgacctaactaagtatgtgattaaaaacttgattttttaattagtataaatgaaaatatttattgtaagagactagtttttttaaataaatattaatattttaaaaagattaatcttaatttccaaaaaacaatatctgaataaatagatatatgctcctatatatatgcatgacgctcaaaaccgcgcagggaggcaacaaattaacaaacaacagtagctagtattttaacattatagaattttaagtcaacagacatgcacgttagaaattgaatttttattattaagatataggtgacttatatacaaagtaaaatattatattttacttaatgaagattatttaaatggatatattagaagttgtttttgttttaactttcaagagagtttatttattatagttggtgataatctttaccgtgaaaaaaaaaacaatatatgaagagagagaatgtgagaagaaaaattgtgaaacaacagtcactttgttgataaaaaaaatgattttgtgtaagaatgttatcattttttgtaacgtatttagttttatagggtgatacactatttgggaagagttacactcttgtaatcatttttataataatgaaatattttttagacgattaggtgaatgtaggcaaaaaatgtcgcgttaaattcgtgtgtttgttattatttttcttgtgatataatttttattgtgtttttacaatcttgtgtgagtgtgaataattttattcgtgtgaacattgattacccaacacattttaattataggtatgtcctacatttgtctctatccaaaatcctcatgcctttaatttgatatgaatacatgtttcaacagcttcttacaaacatatatataatcttataaatatattctttattattaattaaaatttataaatttcacttcttatttcaaaaattaatatcactcataattttataattttattaataaaaaatatattaagaaaaatgtgttaaaaaatatctcaaataataatgattggaagctattacaaaagttgccgcatatgacttttataatccagagtgtccgtataaatagagggtccactttcaccaagtagtaccaagttaagttgcctcttatgacttttatactcaagagtgtacatgaaaagtgcaaagagagggtcacttttcgccaagtggtattacacagttgccgcttatgacttatcctttctcaccaggttgctagcatggaagaagtgtacttaattagtgtgcacatatataaatagagggtcaccttaatttctcattctcacaccaagtagtagtgtcttgacaagttttcagctctgttgcaattccctcttctaccattttgctagcaaactcacatttttatactcaatccaattcagaaaaaaactcttacaaaagttcatatagcttttcatggagccttcaagttattaaggtaagaatagcgagtaaagtgtgtgcatgataagtgtctctgttgtttttctattccaactcttttgaattaagtgttatatgtatattatataatatctttgcttctaattggatcaattttgttttccaatataattctggctttcatgggtggttttgatttactaatagcgtgtttatggaaactcgtttaagaaataacgtttgggatgtgaaagctataagtattagtttctgaaaatcatatctaaaacgtggaaaatcacatcccaaacacgctataaaaataacatagaaacttggtttttctgaaagaagtggttgaaaccgtccacttatattttctttgtgtacttaatagatttcatgcatgcattttgagagttcaataaaatccttattgtagtcccattttgctggaatgcacggcatgtactttattctatatatatttactgtgtcagtactccattaaatgatgcatatacacatgctaggtacccatttgagatattgaatatggataaatagccttttaaaaaatgaaaaagaaaagaaactggtatatggagcttgtgtacggcttatatgtaccagttttttttttttcttttaccaaaaagctgatacgctgctcagccagctcaggtatatctttaatgctgttggaccatacaaatttgataccaattagcattgttttgttgacaaaacaaaaaggtcattttcctccaataagatatcaacacagtggcccgcgatgttgactgtgtgttgaaaaagtgattattactattatgttgtgattcctcaattattggtattccttgtttgttggttggctataaccattttttttatattataggttatttatattaatttatgagcttgttaatttattatcctaattaagttgtttttcaagataattgcttcctttaatttttatgctatgcttggaaagtcatgtgattttatgtttaatacactgctggcatgttttatagtacatcaaattcaaatgtcttgtccatatttaattgatttatctgtttgcaaaaatttaattaacccacagtatacgatacctgtattcatgtgatgtagcagacctctgtcaaataccataaacaatatattcatactccgatccacgttcccgcttgatcattaatattcaataataatgattcacttaattcatgtctcaaagtagtagattgaataagaagaggaatataatagattggtttttcatgcactcttacaaagttactaatcaattggctttccatgttcaggaaattgtaccaaacaaaattctattgtgttcgcctagaagtggaggcttgaattaacatttgtttggaaattgttgcttgtttaaccacaacaatg

SEQ ID NO: 27 - DNA, 19 bp, Artificial Sequence
  Oligonucleotide
tcaaacgacaccgtctcat

SEQ ID NO: 28 - DNA, 41 bp, Artificial Sequence
  Oligonucleotide
acttcgtcagtaacggacgcaagttcgagggccagagcctt

SEQ ID NO: 29 - DNA, 41 bp, Artificial Sequence
  Oligonucleotide
gagtcgaggtcatatcgtgcaagttcgagggccagagcctc

SEQ ID NO: 30 - DNA, 21 bp, Artificial Sequence
  Oligonucleotide
gcgaggaggtcgtagatgaga

SEQ ID NO: 31 - DNA, 25 bp, Artificial Sequence
  Oligonucleotide
tgaagggtagttccgacaaagaaac

SEQ ID NO: 32 - DNA, 23 bp, Artificial Sequence
  Oligonucleotide
agtcaactgcccaacttaaccta

SEQ ID NO: 33 - DNA, 25 bp, Artificial Sequence
  Oligonucleotide
tgcagttctattctggctatcttgt

SEQ ID NO: 34 - DNA, 22 bp, Artificial Sequence
  Oligonucleotide
aaggttctttcaagaaaaggaa

SEQ ID NO: 35 - DNA, 43 bp, Artificial Sequence
  Oligonucleotide
acttcgtcagtaacggactttgtgctttgatcctctgcagata

SEQ ID NO: 36 - DNA, 43 bp, Artificial Sequence
  Oligonucleotide
gagtcgaggtcatatcgttttgtgctttgatcctctgcagatt

SEQ ID NO: 37 - DNA, 26 bp, Artificial Sequence
  Oligonucleotide
tcgaagcactttcctttgtatttcct

SEQ ID NO: 38 - DNA, 23 bp, Artificial Sequence
  Oligonucleotide
cacttaggtcaccaacaagtcga

SEQ ID NO: 39 - DNA, 26 bp, Artificial Sequence
  Oligonucleotide
agtcgatgcaagaagaaagtctcaaa

SEQ ID NO: 40 - DNA, 28 bp, Artificial Sequence
  Oligonucleotide
cttttactttcatgtcagcatgtcttgt

SEQ ID NO: 41 - DNA, 24 bp, Artificial Sequence
  Oligonucleotide
gtcgatgcaagaagaaagtctcaa

SEQ ID NO: 42 - DNA, 25 bp, Artificial Sequence
  Oligonucleotide
gtcagcatgtcttgtaaagaaagga

SEQ ID NO: 43 - DNA, 24 bp, Artificial Sequence
  Oligonucleotide
atttgggttttagagaacataagg

SEQ ID NO: 44 - DNA, 43 bp, Artificial Sequence
  Oligonucleotide
acttcgtcagtaacggacgggggttgttgcatttgtgcttagg

SEQ ID NO: 45 - DNA, 43 bp, Artificial Sequence
  Oligonucleotide
gagtcgaggtcatatcgtgggggttgttgcatttgtgcttagc

SEQ ID NO: 46 - DNA, 22 bp, Artificial Sequence
  Oligonucleotide
tgtgaagaccctgacatgtttc

SEQ ID NO: 47 - DNA, 25 bp, Artificial Sequence
  Oligonucleotide
gcaactcttgcagattcagacaatg

SEQ ID NO: 48 - DNA, 24 bp, Artificial Sequence
  Oligonucleotide
agtggttcaatttgaggtgtcatc

SEQ ID NO: 49 - DNA, 28 bp, Artificial Sequence
  Oligonucleotide
ggtgaagaacatctctagaaaacactta

SEQ ID NO: 50 - DNA, 20 bp, Artificial Sequence
  Oligonucleotide
aagattcccgacgagagcgt

SEQ ID NO: 51 - DNA, 19 bp, Artificial Sequence
  Oligonucleotide
cagtggtggcctcaatgga

SEQ ID NO: 52 - DNA, 16 bp, Artificial Sequence
  Oligonucleotide
tgggtccacccgcttc

SEQ ID NO: 53 - DNA, 24 bp, Artificial Sequence
  Oligonucleotide
caagatcaagtcaacggtcaacga

SEQ ID NO: 54 - DNA, 23 bp, Artificial Sequence
  Oligonucleotide
tagcagatccggtataattaact

SEQ ID NO: 55 - DNA, 45 bp, Artificial Sequence
  Oligonucleotide
acttcgtcagtaacggactcatcatcatcagaagtctctctagtg

SEQ ID NO: 56 - DNA, 45 bp, Artificial Sequence
  Oligonucleotide
gagtcgaggtcatatcgttcatcatcatcagaagtctctctagtc

SEQ ID NO: 57 - DNA, 22 bp, Artificial Sequence
  Oligonucleotide
ggcattcccgctccattagtag

SEQ ID NO: 58 - DNA, 20 bp, Artificial Sequence
  Oligonucleotide
caacagctgcaggaaccaaa

SEQ ID NO: 59 - DNA, 20 bp, Artificial Sequence
  Oligonucleotide
ttcaacggacatgtcatttt

SEQ ID NO: 60 - DNA, 42 bp, Artificial Sequence
  Oligonucleotide
acttcgtcagtaacggacgcagctccttcgctttctgcttgt

SEQ ID NO: 61 - DNA, 42 bp, Artificial Sequence
  Oligonucleotide
gagtcgaggtcatatcgtgcagctccttcgctttctgcttgc

SEQ ID NO: 62 - DNA, 25 bp, Artificial Sequence
  Oligonucleotide
cgtgcattgagcaagagtatacaga

SEQ ID NO: 63 - DNA, 23 bp, Artificial Sequence
  Oligonucleotide
ccatagttaagctggcccaagag

SEQ ID NO: 64 - DNA, 24 bp, Artificial Sequence
  Oligonucleotide
gcagaatttccttggaggtcaaac

SEQ ID NO: 65 - DNA, 33 bp, Artificial Sequence
  Oligonucleotide
cccctctttccaatatttaatacaagattcagt

SEQ ID NO: 66 - DNA, 24 bp, Artificial Sequence
  Oligonucleotide
caagaaaactaaatgaatcactgt

SEQ ID NO: 67 - DNA, 19 bp, Artificial Sequence
  Oligonucleotide
agccacaagcaaattcctc

SEQ ID NO: 68 - DNA, 23 bp, Artificial Sequence
  Oligonucleotide
gctaagcggatagaagacttgac

SEQ ID NO: 69 - DNA, 20 bp, Artificial Sequence
  Oligonucleotide
gcaccagccagaagacagtt

SEQ ID NO: 70 - DNA, 30 bp, Artificial Sequence
  Oligonucleotide
aaaacaaaccacatgagatgtatagacagt

SEQ ID NO: 71 - DNA, 32 bp, Artificial Sequence
  Oligonucleotide
ttttggattgtgatgctttaataattgtggat

SEQ ID NO: 72 - DNA, 21 bp, Artificial Sequence
  Oligonucleotide
agacaaaaccaccagcaccaa

SEQ ID NO: 73 - DNA, 24 bp, Artificial Sequence
  Oligonucleotide
aggcacaaggtagaagaggagatt

SEQ ID NO: 74 - DNA, 18 bp, Artificial Sequence
  Oligonucleotide
tcgggaagatgctggaca

SEQ ID NO: 75 - DNA, 22 bp, Artificial Sequence
  Oligonucleotide
tcgaaataccaaggccaagatg

SEQ ID NO: 76 - DNA, 22 bp, Artificial Sequence
  Oligonucleotide
tcttccatggttcactagaatg

SEQ ID NO: 77 - DNA, 40 bp, Artificial Sequence
  Oligonucleotide
acttcgtcagtaacggacacactcgcggaacgttgaacag

SEQ ID NO: 78 - DNA, 40 bp, Artificial Sequence
  Oligonucleotide
gagtcgaggtcatatcgtacactcgcggaacgttgaacac

SEQ ID NO: 79 - DNA, 24 bp, Artificial Sequence
  Oligonucleotide
aacagaagacaaatacctagtgtg

SEQ ID NO: 80 - DNA, 49 bp, Artificial Sequence
  Oligonucleotide
acttcgtcagtaacggacggaaaagggaaccaagataaagtatattcca

SEQ ID NO: 81 - DNA, 49 bp, Artificial Sequence
  Oligonucleotide
gagtcgaggtcatatcgtggaaaagggaaccaagataaagtatattccg

SEQ ID NO: 82 - DNA, 22 bp, Artificial Sequence
  Oligonucleotide
gtaaccccaactgacaaacaca

SEQ ID NO: 83 - DNA, 21 bp, Artificial Sequence
  Oligonucleotide
tgctcaagatggtgcatgctt

SEQ ID NO: 84 - DNA, 27 bp, Artificial Sequence
  Oligonucleotide
caaattttatgatacgtgcagttaagc

SEQ ID NO: 85 - DNA, 26 bp, Artificial Sequence
  Oligonucleotide
tccctcccacatatacatcatcactt

SEQ ID NO: 86 - DNA, 24 bp, Artificial Sequence
  Oligonucleotide
acccctgatggtaatctttgaaaa

SEQ ID NO: 87 - DNA, 23 bp, Artificial Sequence
  Oligonucleotide
gaaccgtgagtatttgggacaga

SEQ ID NO: 88 - DNA, 17 bp, Artificial Sequence
  Oligonucleotide
gggatcgggcctccaaa

SEQ ID NO: 89 - DNA, 24 bp, Artificial Sequence
  Oligonucleotide
tgccaggctaaacaaattgaatac

SEQ ID NO: 90 - DNA, 22 bp, Artificial Sequence
  Oligonucleotide
tgaacttcaacatttggttttt

SEQ ID NO: 91 - DNA, 44 bp, Artificial Sequence
  Oligonucleotide
acttcgtcagtaacggaccgattgaaaagtgaaaattcgtcatg

SEQ ID NO: 92 - DNA, 44 bp, Artificial Sequence
  Oligonucleotide
gagtcgaggtcatatcgtcgattgaaaagtgaaaattcgtcatc

SEQ ID NO: 93 - DNA, 21 bp, Artificial Sequence
  Oligonucleotide
tcaccaaagacaacagccttg

SEQ ID NO: 94 - DNA, 20 bp, Artificial Sequence
  Oligonucleotide
cgtcttcgctaggacctgaa

SEQ ID NO: 95 - DNA, 19 bp, Artificial Sequence
  Oligonucleotide
gcgtgcgctacaagtcagg

SEQ ID NO: 96 - DNA, 19 bp, Artificial Sequence
  Oligonucleotide
ggtgaggcagcagaaacag

SEQ ID NO: 97 - DNA, 21 bp, Artificial Sequence
  Oligonucleotide
caggaaagggacccttggaaa

SEQ ID NO: 98 - DNA, 20 bp, Artificial Sequence
  Oligonucleotide
gtggcataagcccaagcatt

SEQ ID NO: 99 - DNA, 23 bp, Artificial Sequence
  Oligonucleotide
agcctctggtggtaaggataaag

SEQ ID NO: 100 - DNA, 21 bp, Artificial Sequence
  Oligonucleotide
tgaaatccatgcatccgcaaa

SEQ ID NO: 101 - DNA, 24 bp, Artificial Sequence
  Oligonucleotide
tcagagcactccatattgcttcag

SEQ ID NO: 102 - DNA, 23 bp, Artificial Sequence
  Oligonucleotide
atcccctgtacgaggaagttttg

SEQ ID NO: 103 - DNA, 20 bp, Artificial Sequence
  Oligonucleotide
cgccgtcttcatcgtcgttt

SEQ ID NO: 104 - DNA, 21 bp, Artificial Sequence
  Oligonucleotide
tttgcggagaacccaatttcc

SEQ ID NO: 105 - DNA, 26 bp, Artificial Sequence
  Oligonucleotide
aaactaatagtaatgtagctcctttg

SEQ ID NO: 106 - DNA, 45 bp, Artificial Sequence
  Oligonucleotide
acttcgtcagtaacggacgtcacgatttcttcttcccaagtaaaa

SEQ ID NO: 107 - DNA, 45 bp, Artificial Sequence
  Oligonucleotide
gagtcgaggtcatatcgtgtcacgatttcttcttcccaagtaaag

SEQ ID NO: 108 - DNA, 22 bp, Artificial Sequence
  Oligonucleotide
gcaaggcaacaatctgaatggt

SEQ ID NO: 109 - DNA, 20 bp, Artificial Sequence
  Oligonucleotide
tccacggcatgcttggtatc

SEQ ID NO: 110 - DNA, 21 bp, Artificial Sequence
  Oligonucleotide
cttctcccctgaaaggtatgt

SEQ ID NO: 111 - DNA, 44 bp, Artificial Sequence
  Oligonucleotide
acttcgtcagtaacggacgggtgatggagatgatagcccatttt

SEQ ID NO: 112 - DNA, 44 bp, Artificial Sequence
  Oligonucleotide
gagtcgaggtcatatcgtgggtgatggagatgatagcccatttc

SEQ ID NO: 113 - DNA, 23 bp, Artificial Sequence
  Oligonucleotide
ctaacacaagctttaccattctt

SEQ ID NO: 114 - DNA, 48 bp, Artificial Sequence
  Oligonucleotide
acttcgtcagtaacggacgtgcagatagcatacatcatatacaaatga

SEQ ID NO: 115 - DNA, 48 bp, Artificial Sequence
  Oligonucleotide
gagtcgaggtcatatcgtgtgcagatagcatacatcatatacaaatgg

SEQ ID NO: 116 - DNA, 22 bp, Artificial Sequence
  Oligonucleotide
gaggtccattgcttcctctgct

SEQ ID NO: 117 - DNA, 23 bp, Artificial Sequence
  Oligonucleotide
tggtggagatccacgttctaaag

SEQ ID NO: 118 - DNA, 22 bp, Artificial Sequence
  Oligonucleotide
tgtgatgccgaagctagacatg

SEQ ID NO: 119 - DNA, 25 bp, Artificial Sequence
  Oligonucleotide
ctcaacaagttctgtcaccaaagtt

SEQ ID NO: 120 - DNA, 22 bp, Artificial Sequence
  Oligonucleotide
cctcaggcctcatgattgtctt

SEQ ID NO: 121 - DNA, 24 bp, Artificial Sequence
  Oligonucleotide
caccattaaattttacccggctgt

SEQ ID NO: 122 - DNA, 21 bp, Artificial Sequence
  Oligonucleotide
ccacatccacccaacatgaag

SEQ ID NO: 123 - DNA, 25 bp, Artificial Sequence
  Oligonucleotide
cctgaagactaactggttacgtgaa

SEQ ID NO: 124 - DNA, 23 bp, Artificial Sequence
  Oligonucleotide
agtgctacaactacacctacacc

SEQ ID NO: 125 - DNA, 21 bp, Artificial Sequence
  Oligonucleotide
gggcttcttctgtcactggtt

SEQ ID NO: 126 - DNA, 26 bp, Artificial Sequence
  Oligonucleotide
ctgttaatacccagtactatgctaca

SEQ ID NO: 127 - DNA, 23 bp, Artificial Sequence
  Oligonucleotide
ctcccactattccttgccatctc

SEQ ID NO: 128 - DNA, 24 bp, Artificial Sequence
  Oligonucleotide
ccatagcttaatgccacgatgttg

SEQ ID NO: 129 - DNA, 19 bp, Artificial Sequence
  Oligonucleotide
accagaccatcggccttca

SEQ ID NO: 130 - DNA, 22 bp, Artificial Sequence
  Oligonucleotide
gttgtggctcggctttatgatg

SEQ ID NO: 131 - DNA, 23 bp, Artificial Sequence
  Oligonucleotide
acaaggcacaagtacacatgctc

SEQ ID NO: 132 - DNA, 24 bp, Artificial Sequence
  Oligonucleotide
ggtcgtgctttcatattggttcct

SEQ ID NO: 133 - DNA, 19 bp, Artificial Sequence
  Oligonucleotide
gcgagtgtgcaaagggttt

SEQ ID NO: 134 - DNA, 21 bp, Artificial Sequence
  Oligonucleotide
gtagcagccaacaatgctttc

SEQ ID NO: 135 - DNA, 22 bp, Artificial Sequence
  Oligonucleotide
tggcccctgcatgtatactttc

SEQ ID NO: 136 - DNA, 23 bp, Artificial Sequence
  Oligonucleotide
ggctccatgagacgaaataaagc

SEQ ID NO: 137 - DNA, 24 bp, Artificial Sequence
  Oligonucleotide
gagggcacaagattggtattgttg

SEQ ID NO: 138 - DNA, 23 bp, Artificial Sequence
  Oligonucleotide
caagctggtcttgtacagttgag

SEQ ID NO: 139 - DNA, 23 bp, Artificial Sequence
  Oligonucleotide
accaactactcgttaagcaagga

SEQ ID NO: 140 - DNA, 25 bp, Artificial Sequence
  Oligonucleotide
gctaccaagttgcagaacattatga

SEQ ID NO: 141 - DNA, 24 bp, Artificial Sequence
  Oligonucleotide
tccgagaaagggactgaaaatgag

SEQ ID NO: 142 - DNA, 25 bp, Artificial Sequence
  Oligonucleotide
gcagaaaacagattatcagggctta

SEQ ID NO: 143 - DNA, 25 bp, Artificial Sequence
  Oligonucleotide
gagttgaatgtcacttaggtagcaa

SEQ ID NO: 144 - DNA, 21 bp, Artificial Sequence
  Oligonucleotide
tgagccccattcagttgagaa

SEQ ID NO: 145 - DNA, 21 bp, Artificial Sequence
  Oligonucleotide
gctgttttgggcacatgatga

SEQ ID NO: 146 - DNA, 22 bp, Artificial Sequence
  Oligonucleotide
gggaagctaatccgagaactga

SEQ ID NO: 147 - DNA, 23 bp, Artificial Sequence
  Oligonucleotide
tgacaccagatgagaaacaggag

SEQ ID NO: 148 - DNA, 24 bp, Artificial Sequence
  Oligonucleotide
gaaaagggaggagtgatctgatac

SEQ ID NO: 149 - DNA, 29 bp, Artificial Sequence
  Oligonucleotide
acccagcctaagaaatataatgaagatac

SEQ ID NO: 150 - DNA, 20 bp, Artificial Sequence
  Oligonucleotide
tttgggtgttctgtgatgga

SEQ ID NO: 151 - DNA, 23 bp, Artificial Sequence
  Oligonucleotide
ggcatatcattagggaagtccga

SEQ ID NO: 152 - DNA, 24 bp, Artificial Sequence
  Oligonucleotide
acgcttgactgaagatgatacaac

SEQ ID NO: 153 - DNA, 25 bp, Artificial Sequence
  Oligonucleotide
aagttaatgcagaaccgtgtgtttt

SEQ ID NO: 154 - DNA, 24 bp, Artificial Sequence
  Oligonucleotide
gcttgacagctttggatgttcttc

SEQ ID NO: 155 - DNA, 24 bp, Artificial Sequence
  Oligonucleotide
gtcactcgcacaacactatactac

SEQ ID NO: 156 - DNA, 25 bp, Artificial Sequence
  Oligonucleotide
ccttgatatcgagcatttccttcct

SEQ ID NO: 157 - DNA, 24 bp, Artificial Sequence
  Oligonucleotide
ttcggagaaggttttgatttgttc

SEQ ID NO: 158 - DNA, 28 bp, Artificial Sequence
  Oligonucleotide
tgaagagagatcagattaaagagagtga

SEQ ID NO: 159 - DNA, 20 bp, Artificial Sequence
  Oligonucleotide
tgtagagtctcctggccaaa

SEQ ID NO: 160 - DNA, 24 bp, Artificial Sequence
  Oligonucleotide
cctctccctcatattccattgctt

SEQ ID NO: 161 - DNA, 19 bp, Artificial Sequence
  Oligonucleotide
tggcactacccacatgaac

SEQ ID NO: 162 - DNA, 23 bp, Artificial Sequence
  Oligonucleotide
tgcaaacaatgtagcccaatcac

SEQ ID NO: 163 - DNA, 26 bp, Artificial Sequence
  Oligonucleotide
tgcatgaatgacttttctattggaga

SEQ ID NO: 164 - DNA, 28 bp, Artificial Sequence
  Oligonucleotide
gtccaacaggtaagttaaacaactatga

SEQ ID NO: 165 - DNA, 23 bp, Artificial Sequence
  Oligonucleotide
aaacgaacaatcttggacaagca

SEQ ID NO: 166 - DNA, 26 bp, Artificial Sequence
  Oligonucleotide
acaaagagtacacgtaatatcacacg

SEQ ID NO: 167 - DNA, 26 bp, Artificial Sequence
  Oligonucleotide
gtctcggatattttctgttagtccaa

SEQ ID NO: 168 - DNA, 23 bp, Artificial Sequence
  Oligonucleotide
aagggtgatggagacagatagga

SEQ ID NO: 169 - DNA, 24 bp, Artificial Sequence
  Oligonucleotide
cgtgtactctttgtctgattggaa

SEQ ID NO: 170 - DNA, 21 bp, Artificial Sequence
  Oligonucleotide
gggaggttatgttgccttgct

SEQ ID NO: 171 - DNA, 21 bp, Artificial Sequence
  Oligonucleotide
gccaaggaccaaaggacttac

SEQ ID NO: 172 - DNA, 26 bp, Artificial Sequence
  Oligonucleotide
gtgcataacatgtgcttctataggtt

SEQ ID NO: 173 - DNA, 21 bp, Artificial Sequence
  Oligonucleotide
agcacaaaggattccacaaca

SEQ ID NO: 174 - DNA, 21 bp, Artificial Sequence
  Oligonucleotide
gccaaggaccaaaggacttac

SEQ ID NO: 175 - DNA, 23 bp, Artificial Sequence
  Oligonucleotide
gggaggttatgttgccttgctat

SEQ ID NO: 176 - DNA, 26 bp, Artificial Sequence
  Oligonucleotide
ccaaggaagggacaaatgatacaaag

SEQ ID NO: 177 - DNA, 23 bp, Artificial Sequence
  Oligonucleotide
tgcagtccatgccatattcaaac

SEQ ID NO: 178 - DNA, 19 bp, Artificial Sequence
  Oligonucleotide
aaccggcctctcctaaagg

SEQ ID NO: 179 - DNA, 29 bp, Artificial Sequence
  Oligonucleotide
ttgatgaaatataagtcgcttgttgatag

SEQ ID NO: 180 - DNA, 25 bp, Artificial Sequence
  Oligonucleotide
atctttgagatgcaacgtatttgta

SEQ ID NO: 181 - DNA, 27 bp, Artificial Sequence
  Oligonucleotide
caacgacctaaatgatgtgctatatcc

SEQ ID NO: 182 - DNA, 25 bp, Artificial Sequence
  Oligonucleotide
gcaagtattccttgtacccttcatc

SEQ ID NO: 183 - DNA, 28 bp, Artificial Sequence
  Oligonucleotide
ttggtctgaaagtgtaaatatagtcacg

SEQ ID NO: 184 - DNA, 22 bp, Artificial Sequence
  Oligonucleotide
gctgcaattctcttccaccatt

SEQ ID NO: 185 - DNA, 20 bp, Artificial Sequence
  Oligonucleotide
cgtggtgtcatcttgcgtaa

SEQ ID NO: 186 - DNA, 26 bp, Artificial Sequence
  Oligonucleotide
aacagaagccatttgaagatttacca

SEQ ID NO: 187 - DNA, 20 bp, Artificial Sequence
  Oligonucleotide
gtgcatgatcttcctgccaa

SEQ ID NO: 188 - DNA, 27 bp, Artificial Sequence
  Oligonucleotide
gaaggaattctctcatcatgtgtttac

SEQ ID NO: 189 - DNA, 22 bp, Artificial Sequence
  Oligonucleotide
tgagccagtagcataacctgaa

SEQ ID NO: 190 - DNA, 20 bp, Artificial Sequence
  Oligonucleotide
ggcgaaaagtgaccctctct

SEQ ID NO: 191 - DNA, 25 bp, Artificial Sequence
  Oligonucleotide
accaagttaagttgcctcttatgac

SEQ ID NO: 192 - DNA, 19 bp, Artificial Sequence
  Oligonucleotide
gcgatgcgagtgctaagtg

SEQ ID NO: 193 - DNA, 24 bp, Artificial Sequence
  Oligonucleotide
gtgcatgttgaacaaaggtctctt

SEQ ID NO: 194 - DNA, 23 bp, Artificial Sequence
  Oligonucleotide
ccctaatcatcaaacccagcaaa

SEQ ID NO: 195 - DNA, 25 bp, Artificial Sequence
  Oligonucleotide
agcacatcatttaggtcgttgaaag

SEQ ID NO: 196 - DNA, 24 bp, Artificial Sequence
  Oligonucleotide
tgctgggtttgatgattagggtaa

SEQ ID NO: 197 - DNA, 24 bp, Artificial Sequence
  Oligonucleotide
ggaagaagatgaagggtacaagga

SEQ ID NO: 198 - DNA, 22 bp, Artificial Sequence
  Oligonucleotide
ggtaggttctagcccgatagga

SEQ ID NO: 199 - DNA, 27 bp, Artificial Sequence
  Oligonucleotide
cgtgactatatttacactttcagacca

SEQ ID NO: 200 - DNA, 22 bp, Artificial Sequence
  Oligonucleotide
aaaccacccatgaaagccagaa

SEQ ID NO: 201 - DNA, 24 bp, Artificial Sequence
  Oligonucleotide
aagaatagcgagtaaagtgtgtgc

SEQ ID NO: 202 - DNA, 22 bp, Artificial Sequence
  Oligonucleotide
aagagccaaactacctgcgaaa

SEQ ID NO: 203 - DNA, 22 bp, Artificial Sequence
  Oligonucleotide
acgagaactgacagggtctgat

SEQ ID NO: 204 - DNA, 22 bp, Artificial Sequence
  Oligonucleotide
aggtgtttgcttcgttgtgaaa

SEQ ID NO: 205 - DNA, 21 bp, Artificial Sequence
  Oligonucleotide
ccaaagtgcaccaccttcctt

SEQ ID NO: 206 - DNA, 28 bp, Artificial Sequence
  Oligonucleotide
ttggtctgaaagtgtaaatatagtcacg

SEQ ID NO: 207 - DNA, 25 bp, Artificial Sequence
  Oligonucleotide
gcaagtattccttgtacccttcatc

SEQ ID NO: 208 - DNA, 30 bp, Artificial Sequence
  Oligonucleotide
ctcttatgtttaatcgatgtggtctcaatc

SEQ ID NO: 209 - DNA, 23 bp, Artificial Sequence
  Oligonucleotide
agtggcccttatgcactattttc

SEQ ID NO: 210 - DNA, 25 bp, Artificial Sequence
  Oligonucleotide
agtggtatgaagtggaagtgtcttg

SEQ ID NO: 211 - DNA, 19 bp, Artificial Sequence
  Oligonucleotide
ggcccgtggtgtcatcttg

SEQ ID NO: 212 - DNA, 25 bp, Artificial Sequence
  Oligonucleotide
actcagcagcattctgttagaagga

SEQ ID NO: 213 - DNA, 25 bp, Artificial Sequence
  Oligonucleotide
actcttacctgatagaggactgaag

SEQ ID NO: 214 - DNA, 21 bp, Artificial Sequence
  Oligonucleotide
ggctccactgccattaccatt

SEQ ID NO: 215 - DNA, 22 bp, Artificial Sequence
  Oligonucleotide
tgagccagtagcataacctgaa

SEQ ID NO: 216 - DNA, 22 bp, Artificial Sequence
  Oligonucleotide
tttcttttgggacgaagggttt

SEQ ID NO: 217 - DNA, 23 bp, Artificial Sequence
  Oligonucleotide
agagtagtgacagagttgagcaa

SEQ ID NO: 218 - DNA, 23 bp, Artificial Sequence
  Oligonucleotide
tgcaacagagctgaaaacttgtc

SEQ ID NO: 219 - DNA, 20 bp, Artificial Sequence
  Oligonucleotide
acacagttgccgcttatgac

SEQ ID NO: 220 - DNA, 23 bp, Artificial Sequence
  Oligonucleotide
agtgcataagggccactaatttc

SEQ ID NO: 221 - DNA, 25 bp, Artificial Sequence
  Oligonucleotide
ctattttgtttgtttgcacctacca

SEQ ID NO: 222 - DNA, 30 bp, Artificial Sequence
  Oligonucleotide
aaatccaaatctcttgttattcaaacacta

SEQ ID NO: 223 - DNA, 24 bp, Artificial Sequence
  Oligonucleotide
cacctaccaagtatggcacatagc

SEQ ID NO: 224 - DNA, 25 bp, Artificial Sequence
  Oligonucleotide
gccactcacacatatacttgcactt

SEQ ID NO: 225 - DNA, 23 bp, Artificial Sequence
  Oligonucleotide
tgatggaagcaagacggagagat

SEQ ID NO: 226 - DNA, 24 bp, Artificial Sequence
  Oligonucleotide
gggacttaatggagccctattctc

SEQ ID NO: 227 - DNA, 22 bp, Artificial Sequence
  Oligonucleotide
tggcaggaagatcatgcactta

SEQ ID NO: 228 - DNA, 27 bp, Artificial Sequence
  Oligonucleotide
aacaactacgttttctcttcacttcag

SEQ ID NO: 229 - DNA, 20 bp, Artificial Sequence
  Oligonucleotide
cctgggtggaaacctctcaa

SEQ ID NO: 230 - DNA, 27 bp, Artificial Sequence
  Oligonucleotide
tgtaacgtattcggttttatagggtga

SEQ ID NO: 231 - DNA, 27 bp, Artificial Sequence
  Oligonucleotide
aacaaacatacgaatttaacgcgacat

SEQ ID NO: 232 - DNA, 23 bp, Artificial Sequence
  Oligonucleotide
agagggaattgcaacagagctga

SEQ ID NO: 233 - DNA, 23 bp, Artificial Sequence
  Oligonucleotide
tgccgcttatgacttatcctttc

SEQ ID NO: 234 - DNA, 21 bp, Artificial Sequence
  Oligonucleotide
attggtgttggcatggttcac

SEQ ID NO: 235 - DNA, 22 bp, Artificial Sequence
  Oligonucleotide
taaacaaagacgcctcctgcta

SEQ ID NO: 236 - DNA, 25 bp, Artificial Sequence
  Oligonucleotide
cccataatacaacccagaaatggaa

SEQ ID NO: 237 - DNA, 24 bp, Artificial Sequence
  Oligonucleotide
gtttacgtactatgcatgaccaca

SEQ ID NO: 238 - DNA, 21 bp, Artificial Sequence
  Oligonucleotide
ttcgaagttcagttggcacaa

SEQ ID NO: 239 - DNA, 23 bp, Artificial Sequence
  Oligonucleotide
agggccaagcttagacaaggtaa

SEQ ID NO: 240 - DNA, 21 bp, Artificial Sequence
  Oligonucleotide
atgcagcagtatgcaatccaa

SEQ ID NO: 241 - DNA, 28 bp, Artificial Sequence
  Oligonucleotide
ttcactttacatttctactccaacaata

SEQ ID NO: 242 - DNA, 27 bp, Artificial Sequence
  Oligonucleotide
ggagagaaatgactcacatagcatagg

SEQ ID NO: 243 - DNA, 28 bp, Artificial Sequence
  Oligonucleotide
tgagaccacatcgattaaacataagaga

SEQ ID NO: 244 - DNA, 21 bp, Artificial Sequence
  Oligonucleotide
aaggcccgtggtgtcatcttg

SEQ ID NO: 245 - DNA, 24 bp, Artificial Sequence
  Oligonucleotide
tggtatgaagtggaagtgtcttga

SEQ ID NO: 246 - DNA, 21 bp, Artificial Sequence
  Oligonucleotide
actggctcaacgtgactctta

SEQ ID NO: 247 - DNA, 26 bp, Artificial Sequence
  Oligonucleotide
tgaacaaaatgttagatggaatgaca

SEQ ID NO: 248 - DNA, 23 bp, Artificial Sequence
  Oligonucleotide
gggcatgtgctcttaatttctga

SEQ ID NO: 249 - DNA, 20 bp, Artificial Sequence
  Oligonucleotide
gtgaaccatgccaacaccaa

SEQ ID NO: 250 - DNA, 26 bp, Artificial Sequence
  Oligonucleotide
ggaagcaagacggagagataagattg

SEQ ID NO: 251 - DNA, 25 bp, Artificial Sequence
  Oligonucleotide
gccactcacacatatacttgcactt

SEQ ID NO: 252 - DNA, 20 bp, Artificial Sequence
  Oligonucleotide
ccagacgcaacttgtgcaat

SEQ ID NO: 253 - DNA, 22 bp, Artificial Sequence
  Oligonucleotide
gttggcatggttcacctaacag

SEQ ID NO: 254 - DNA, 25 bp, Artificial Sequence
  Oligonucleotide
atgtggtcatgcatagtacgtaaac

SEQ ID NO: 255 - DNA, 20 bp, Artificial Sequence
  Oligonucleotide
caatgcaaggactgcaaggt

SEQ ID NO: 256 - DNA, 27 bp, Artificial Sequence
  Oligonucleotide
ggagagaaatgactcacatagcatagg

SEQ ID NO: 257 - DNA, 28 bp, Artificial Sequence
  Oligonucleotide
tgagaccacatcgattaaacataagaga

SEQ ID NO: 258 - DNA, 25 bp, Artificial Sequence
  Oligonucleotide
gccactcacacatatacttgcactt

SEQ ID NO: 259 - DNA, 23 bp, Artificial Sequence
  Oligonucleotide
tgatggaagcaagacggagagat

SEQ ID NO: 260 - DNA, 25 bp, Artificial Sequence
  Oligonucleotide
gaggaaagtaaattctgctgccaaa

SEQ ID NO: 261 - DNA, 25 bp, Artificial Sequence
  Oligonucleotide
gattgtgatggtcctagctaaaagt

SEQ ID NO: 262 - DNA, 23 bp, Artificial Sequence
  Oligonucleotide
gcaaaggctattgagccaaagac

SEQ ID NO: 263 - DNA, 22 bp, Artificial Sequence
  Oligonucleotide
gcctagaagtggaggcttgaat

SEQ ID NO: 264 - DNA, 19 bp, Artificial Sequence
  Oligonucleotide
atcttggaggcggtgctct

SEQ ID NO: 265 - DNA, 24 bp, Artificial Sequence
  Oligonucleotide
tggaggaagctatgagaagtgttg

SEQ ID NO: 266 - DNA, 22 bp, Artificial Sequence
  Oligonucleotide
ggcagttctaaatgcagcatca

SEQ ID NO: 267 - DNA, 21 bp, Artificial Sequence
  Oligonucleotide
gcagcatgagccaaagcaatg

SEQ ID NO: 268 - DNA, 25 bp, Artificial Sequence
  Oligonucleotide
gcagctgggagaatgttattgtatg

SEQ ID NO: 269 - DNA, 22 bp, Artificial Sequence
  Oligonucleotide
ttctgcaattcctaggtgttca

SEQ ID NO: 270 - DNA, 22 bp, Artificial Sequence
  Oligonucleotide
attcatcaatggcggctgcaaa

SEQ ID NO: 271 - DNA, 25 bp, Artificial Sequence
  Oligonucleotide
aagattcttcattctacgtggctct

SEQ ID NO: 272 - DNA, 21 bp, Artificial Sequence
  Oligonucleotide
attgctgctgcaccggttgat

SEQ ID NO: 273 - DNA, 22 bp, Artificial Sequence
  Oligonucleotide
gtcatcctctgctgctaatcca

SEQ ID NO: 274 - DNA, 26 bp, Artificial Sequence
  Oligonucleotide
tcattctttgttgaaaatacttgatt

SEQ ID NO: 275 - DNA, 24 bp, Artificial Sequence
  Oligonucleotide
ttgatattgatatgatgggttgaa

SEQ ID NO: 276 - DNA, 21 bp, Artificial Sequence
  Oligonucleotide
gcgaggaggtcgtagatgaga

SEQ ID NO: 277 - DNA, 25 bp, Artificial Sequence
  Oligonucleotide
tgaagggtagttccgacaaagaaac

SEQ ID NO: 278 - DNA, 16 bp, Artificial Sequence
  Oligonucleotide
tgtcgtttgacaaggc

SEQ ID NO: 279 - DNA, 15 bp, Artificial Sequence
  Oligonucleotide
tcgtttgacgaggct

SEQ ID NO: 280 - DNA, 15 bp, Artificial Sequence
  Oligonucleotide
accacttgtctggcc

SEQ ID NO: 281 - DNA, 15 bp, Artificial Sequence
  Oligonucleotide
caccacttgtttggc

SEQ ID NO: 282 - DNA, 20 bp, Artificial Sequence
  Oligonucleotide
cttccaatatataaaaaaaa

SEQ ID NO: 283 - DNA, 19 bp, Artificial Sequence
  Oligonucleotide
ttccaatatatcaaaaaaa

SEQ ID NO: 284 - DNA, 14 bp, Artificial Sequence
  Oligonucleotide
cccttgccctttac

SEQ ID NO: 285 - DNA, 17 bp, Artificial Sequence
  Oligonucleotide
ttacccttgctctttac

SEQ ID NO: 286 - DNA, 19 bp, Artificial Sequence
  Oligonucleotide
caagggtaacgattttcag

SEQ ID NO: 287 - DNA, 19 bp, Artificial Sequence
  Oligonucleotide
caagggtaacgattttctg

SEQ ID NO: 288 - DNA, 18 bp, Artificial Sequence
  Oligonucleotide
aagacaccgagcaacatc

SEQ ID NO: 289 - DNA, 15 bp, Artificial Sequence
  Oligonucleotide
acaccgggcaacatc

SEQ ID NO: 290 - DNA, 14 bp, Artificial Sequence
  Oligonucleotide
cgccaccatcgtaa

SEQ ID NO: 291 - DNA, 15 bp, Artificial Sequence
  Oligonucleotide
acgccaccatcttaa

SEQ ID NO: 292 - DNA, 15 bp, Artificial Sequence
  Oligonucleotide
acgcgccgtaatacg

SEQ ID NO: 293 - DNA, 16 bp, Artificial Sequence
  Oligonucleotide
aacgcgctgtaatacg

SEQ ID NO: 294 - DNA, 20 bp, Artificial Sequence
  Oligonucleotide
aatcggcgaagacagtgaac

SEQ ID NO: 295 - DNA, 18 bp, Artificial Sequence
  Oligonucleotide
atcggcgaagacggtgaa

SEQ ID NO: 296 - DNA, 18 bp, Artificial Sequence
  Oligonucleotide
ccggaagcacttgtacag

SEQ ID NO: 297 - DNA, 18 bp, Artificial Sequence
  Oligonucleotide
ccggaagcacttttacag

SEQ ID NO: 298 - DNA, 22 bp, Artificial Sequence
  Oligonucleotide
tcaattttaatgatttcgtgac

SEQ ID NO: 299 - DNA, 23 bp, Artificial Sequence
  Oligonucleotide
tcaattttaatgatttggtgaca

SEQ ID NO: 300 - DNA, 19 bp, Artificial Sequence
  Oligonucleotide
cggtaagagtaataataca

SEQ ID NO: 301 - DNA, 19 bp, Artificial Sequence
  Oligonucleotide
cggtaagagtaacaataca

SEQ ID NO: 302 - DNA, 15 bp, Artificial Sequence
  Oligonucleotide
cctttcttcaccatg

SEQ ID NO: 303 - DNA, 17 bp, Artificial Sequence
  Oligonucleotide
agttcctttcttcatca

SEQ ID NO: 304 - DNA, 15 bp, Artificial Sequence
  Oligonucleotide
attgcttcatgccgt

SEQ ID NO: 305 - DNA, 16 bp, Artificial Sequence
  Oligonucleotide
attgcttcatgctgtg

SEQ ID NO: 306 - DNA, 17 bp, Artificial Sequence
  Oligonucleotide
cagtgggtagagtgaaa

SEQ ID NO: 307 - DNA, 16 bp, Artificial Sequence
  Oligonucleotide
agtgggtagagagaaa

SEQ ID NO: 308 - DNA, 16 bp, Artificial Sequence
  Oligonucleotide
cagtagctgctgccgc

SEQ ID NO: 309 - DNA, 16 bp, Artificial Sequence
  Oligonucleotide
cagtagctgccgccgc

SEQ ID NO: 310 - DNA, 17 bp, Artificial Sequence
  Oligonucleotide
aggactttggaaccatg

SEQ ID NO: 311 - DNA, 16 bp, Artificial Sequence
  Oligonucleotide
actttggaaccgtgtc

SEQ ID NO: 312 - DNA, 18 bp, Artificial Sequence
  Oligonucleotide
actaccatcacaataagc

SEQ ID NO: 313 - DNA, 17 bp, Artificial Sequence
  Oligonucleotide
accatcacaatatgcat

SEQ ID NO: 314 - DNA, 14 bp, Artificial Sequence
  Oligonucleotide
ttggcgcacttggt

SEQ ID NO: 315 - DNA, 14 bp, Artificial Sequence
  Oligonucleotide
tggcgcactttgtc

SEQ ID NO: 316 - DNA, 21 bp, Artificial Sequence
  Oligonucleotide
taaagatgtgtattttaactt

SEQ ID NO: 317 - DNA, 19 bp, Artificial Sequence
  Oligonucleotide
aaagatgtgtattttgact

SEQ ID NO: 318 - DNA, 17 bp, Artificial Sequence
  Oligonucleotide
tttccctcaagatagag

SEQ ID NO: 319 - DNA, 16 bp, Artificial Sequence
  Oligonucleotide
tttccctcaagattga

SEQ ID NO: 320 - DNA, 16 bp, Artificial Sequence
  Oligonucleotide
tcaaccaacaaccatg

SEQ ID NO: 321 - DNA, 15 bp, Artificial Sequence
  Oligonucleotide
tcaaccaaccaccat

SEQ ID NO: 322 - DNA, 16 bp, Artificial Sequence
  Oligonucleotide
cagcgagtccaacatt

SEQ ID NO: 323 - DNA, 16 bp, Artificial Sequence
  Oligonucleotide
agcgagtccaacgttt

SEQ ID NO: 324 - DNA, 17 bp, Artificial Sequence
  Oligonucleotide
ctgacccagtaaacaac

SEQ ID NO: 325 - DNA, 15 bp, Artificial Sequence
  Oligonucleotide
ctgacccagtcaaca

SEQ ID NO: 326 - DNA, 19 bp, Artificial Sequence
  Oligonucleotide
cattgagattgcacttcgt

SEQ ID NO: 327 - DNA, 20 bp, Artificial Sequence
  Oligonucleotide
ccattgagattgtacttcgt

SEQ ID NO: 328 - DNA, 19 bp, Artificial Sequence
  Oligonucleotide
tcgtgtgattttcatcatc

SEQ ID NO: 329 - DNA, 19 bp, Artificial Sequence
  Oligonucleotide
cgtgtgattttgatcatca

SEQ ID NO: 330 - DNA, 16 bp, Artificial Sequence
  Oligonucleotide
acccgaaactcgcacg

SEQ ID NO: 331 - DNA, 16 bp, Artificial Sequence
  Oligonucleotide
cgaaacttgcacgcac

SEQ ID NO: 332 - DNA, 15 bp, Artificial Sequence
  Oligonucleotide
ccaacatccatcgaa

SEQ ID NO: 333 - DNA, 17 bp, Artificial Sequence
  Oligonucleotide
taccaacatccattgaa

SEQ ID NO: 334 - DNA, 17 bp, Artificial Sequence
  Oligonucleotide
ctcgtcaatttcatcaa

SEQ ID NO: 335 - DNA, 17 bp, Artificial Sequence
  Oligonucleotide
ctcgtcaatttcttcaa

SEQ ID NO: 336 - DNA, 15 bp, Artificial Sequence
  Oligonucleotide
cagcaacgaggtaag

SEQ ID NO: 337 - DNA, 15 bp, Artificial Sequence
  Oligonucleotide
cagcaacaaggtaag

SEQ ID NO: 338 - DNA, 20 bp, Artificial Sequence
  Oligonucleotide
catgatgtactaacgcagta

SEQ ID NO: 339 - DNA, 21 bp, Artificial Sequence
  Oligonucleotide
tcatgatgtactaatgcagta

SEQ ID NO: 340 - DNA, 21 bp, Artificial Sequence
  Oligonucleotide
cctataaataaggaaccaggt

SEQ ID NO: 341 - DNA, 20 bp, Artificial Sequence
  Oligonucleotide
cctataaataaggaacctgg

SEQ ID NO: 342 - DNA, 21 bp, Artificial Sequence
  Oligonucleotide
tcattacacaatagcattttc

SEQ ID NO: 343 - DNA, 20 bp, Artificial Sequence
  Oligonucleotide
cattacacaatagccttttc

SEQ ID NO: 344 - DNA, 19 bp, Artificial Sequence
  Oligonucleotide
tgagaatcaacatgtgagt

SEQ ID NO: 345 - DNA, 19 bp, Artificial Sequence
  Oligonucleotide
agaatcaacatgtgggtaa

SEQ ID NO: 346 - DNA, 18 bp, Artificial Sequence
  Oligonucleotide
aatcctgtacgacggtaa

SEQ ID NO: 347 - DNA, 17 bp, Artificial Sequence
  Oligonucleotide
tcctgtacgactgtaag

SEQ ID NO: 348 - DNA, 21 bp, Artificial Sequence
  Oligonucleotide
ttgaacataaaaggacaatgg

SEQ ID NO: 349 - DNA, 21 bp, Artificial Sequence
  Oligonucleotide
ttgaacataaaagggcaatgg

SEQ ID NO: 350 - DNA, 20 bp, Artificial Sequence
  Oligonucleotide
aggcattagttgtgcttctt

SEQ ID NO: 351 - DNA, 20 bp, Artificial Sequence
  Oligonucleotide
aggcattagttgtgcttttt

SEQ ID NO: 352 - DNA, 19 bp, Artificial Sequence
  Oligonucleotide
tctgcaacaatcaacattt

SEQ ID NO: 353 - DNA, 20 bp, Artificial Sequence
  Oligonucleotide
atctgcaacaatcagcattt

SEQ ID NO: 354 - DNA, 18 bp, Artificial Sequence
  Oligonucleotide
tgggaagtctactctgat

SEQ ID NO: 355 - DNA, 20 bp, Artificial Sequence
  Oligonucleotide
agtgggaagtctactcttat

SEQ ID NO: 356 - DNA, 16 bp, Artificial Sequence
  Oligonucleotide
aagcttctggccaaag

SEQ ID NO: 357 - DNA, 14 bp, Artificial Sequence
  Oligonucleotide
tctggccatagcta

SEQ ID NO: 358 - DNA, 22 bp, Artificial Sequence
  Oligonucleotide
agactataaaaatgaccaaatt

SEQ ID NO: 359 - DNA, 22 bp, Artificial Sequence
  Oligonucleotide
agactataaaaatgaccaattt

SEQ ID NO: 360 - DNA, 21 bp, Artificial Sequence
  Oligonucleotide
cttggattgggagcaaattac

SEQ ID NO: 361 - DNA, 19 bp, Artificial Sequence
  Oligonucleotide
tggattgggagcgaattac

SEQ ID NO: 362 - DNA, 19 bp, Artificial Sequence
  Oligonucleotide
ttgtagactgcgttttctg

SEQ ID NO: 363 - DNA, 20 bp, Artificial Sequence
  Oligonucleotide
tacttgtagactgtgttttc

SEQ ID NO: 364 - DNA, 24 bp, Artificial Sequence
  Oligonucleotide
tgcataacaaaaaccatgattaaa

SEQ ID NO: 365 - DNA, 24 bp, Artificial Sequence
  Oligonucleotide
tgcataacaaaaaccatgtttaaa

SEQ ID NO: 366 - DNA, 19 bp, Artificial Sequence
  Oligonucleotide
ccagtaaaataatgctcaa

SEQ ID NO: 367 - DNA, 19 bp, Artificial Sequence
  Oligonucleotide
tgccagtaaaataatgttc

SEQ ID NO: 368 - DNA, 17 bp, Artificial Sequence
  Oligonucleotide
cacaaacttgccaacta

SEQ ID NO: 369 - DNA, 19 bp, Artificial Sequence
  Oligonucleotide
cacaaacttgcgaactatt

SEQ ID NO: 370 - DNA, 19 bp, Artificial Sequence
  Oligonucleotide
tcatttaaccgctcattta

SEQ ID NO: 371 - DNA, 22 bp, Artificial Sequence
  Oligonucleotide
tggatcatttaaccgttcattt

SEQ ID NO: 372 - DNA, 21 bp, Artificial Sequence
  Oligonucleotide
ctgagacagagatatcagatt

SEQ ID NO: 373 - DNA, 20 bp, Artificial Sequence
  Oligonucleotide
tgagacagagatatcaggtt

SEQ ID NO: 374 - DNA, 19 bp, Artificial Sequence
  Oligonucleotide
tccagtcctaacaattcaa

SEQ ID NO: 375 - DNA, 21 bp, Artificial Sequence
  Oligonucleotide
agtccagtcctaataattcaa

SEQ ID NO: 376 - DNA, 17 bp, Artificial Sequence
  Oligonucleotide
cacaatgatttttcctg

SEQ ID NO: 377 - DNA, 19 bp, Artificial Sequence
  Oligonucleotide
acaatgatttttcttgttc

SEQ ID NO: 378 - DNA, 17 bp, Artificial Sequence
  Oligonucleotide
catgtgtgcaacggaaa

SEQ ID NO: 379 - DNA, 17 bp, Artificial Sequence
  Oligonucleotide
catgtgtgcatcggaaa

SEQ ID NO: 380 - DNA, 17 bp, Artificial Sequence
  Oligonucleotide
ttggagatactcctagg

SEQ ID NO: 381 - DNA, 18 bp, Artificial Sequence
  Oligonucleotide
ttggagatactcttagga

SEQ ID NO: 382 - DNA, 18 bp, Artificial Sequence
  Oligonucleotide
ccaaataacacgagtact

SEQ ID NO: 383 - DNA, 16 bp, Artificial Sequence
  Oligonucleotide
taacacgagttctcgt

SEQ ID NO: 384 - DNA, 14 bp, Artificial Sequence
  Oligonucleotide
catgcatcatgacc

SEQ ID NO: 385 - DNA, 14 bp, Artificial Sequence
  Oligonucleotide
catgcatcatggcc

SEQ ID NO: 386 - DNA, 15 bp, Artificial Sequence
  Oligonucleotide
cgtattgcccctttc

SEQ ID NO: 387 - DNA, 19 bp, Artificial Sequence
  Oligonucleotide
atgtcgtattgcctctttc

SEQ ID NO: 388 - DNA, 22 bp, Artificial Sequence
  Oligonucleotide
tttgtttaatttcagctatatc

SEQ ID NO: 389 - DNA, 24 bp, Artificial Sequence
  Oligonucleotide
aatttgtttaatttctgctatatc

SEQ ID NO: 390 - DNA, 18 bp, Artificial Sequence
  Oligonucleotide
ctttgcatcatttatccc

SEQ ID NO: 391 - DNA, 17 bp, Artificial Sequence
  Oligonucleotide
cctttgcatcatttgtc

SEQ ID NO: 392 - DNA, 16 bp, Artificial Sequence
  Oligonucleotide
ctatatcaagtgcctt

SEQ ID NO: 393 - DNA, 17 bp, Artificial Sequence
  Oligonucleotide
ctatatcaagtgctttt

SEQ ID NO: 394 - DNA, 17 bp, Artificial Sequence
  Oligonucleotide
cctattgaagcacatgt

SEQ ID NO: 395 - DNA, 18 bp, Artificial Sequence
  Oligonucleotide
acctattgaagcacttgt

SEQ ID NO: 396 - DNA, 17 bp, Artificial Sequence
  Oligonucleotide
tattcaatcactcattg

SEQ ID NO: 397 - DNA, 19 bp, Artificial Sequence
  Oligonucleotide
ttattcaatcacttattgt

SEQ ID NO: 398 - DNA, 16 bp, Artificial Sequence
  Oligonucleotide
ttttacgtatgctagc

SEQ ID NO: 399 - DNA, 15 bp, Artificial Sequence
  Oligonucleotide
tttacgtttgctagc

SEQ ID NO: 400 - DNA, 16 bp, Artificial Sequence
  Oligonucleotide
ttgctcttagccaata

SEQ ID NO: 401 - DNA, 15 bp, Artificial Sequence
  Oligonucleotide
tgctcttagccgata

SEQ ID NO: 402 - DNA, 21 bp, Artificial Sequence
  Oligonucleotide
tctatgaaaagctacgaactt

SEQ ID NO: 403 - DNA, 23 bp, Artificial Sequence
  Oligonucleotide
ctctatgaaaagctatgaacttt

SEQ ID NO: 404 - DNA, 20 bp, Artificial Sequence
  Oligonucleotide
catgattaaaagacggtcta

SEQ ID NO: 405 - DNA, 20 bp, Artificial Sequence
  Oligonucleotide
ttcatgattaaaagactgtc

SEQ ID NO: 406 - DNA, 20 bp, Artificial Sequence
  Oligonucleotide
tgttttaaccaagtaatacg

SEQ ID NO: 407 - DNA, 20 bp, Artificial Sequence
  Oligonucleotide
ttgttttaaccaagtagtac

SEQ ID NO: 408 - DNA, 20 bp, Artificial Sequence
  Oligonucleotide
tcatgtacactctttgagta

SEQ ID NO: 409 - DNA, 21 bp, Artificial Sequence
  Oligonucleotide
ttcatgtacactcttgagtat

SEQ ID NO: 410 - DNA, 23 bp, Artificial Sequence
  Oligonucleotide
taattattaactctttccttttg

SEQ ID NO: 411 - DNA, 24 bp, Artificial Sequence
  Oligonucleotide
attattaactctttctttttgtct

SEQ ID NO: 412 - DNA, 23 bp, Artificial Sequence
  Oligonucleotide
tcatctatataaacttcgactaa

SEQ ID NO: 413 - DNA, 23 bp, Artificial Sequence
  Oligonucleotide
ctcatctatataaacttggacta

SEQ ID NO: 414 - DNA, 15 bp, Artificial Sequence
  Oligonucleotide
tgcccctaacacaac

SEQ ID NO: 415 - DNA, 15 bp, Artificial Sequence
  Oligonucleotide
tgccccttacacaac

SEQ ID NO: 416 - DNA, 20 bp, Artificial Sequence
  Oligonucleotide
atggtgttttatctaagttt

SEQ ID NO: 417 - DNA, 21 bp, Artificial Sequence
  Oligonucleotide
aaatggtgttttatcttttat

SEQ ID NO: 418 - DNA, 20 bp, Artificial Sequence
  Oligonucleotide
tgataagtgtctctgttgtt

SEQ ID NO: 419 - DNA, 20 bp, Artificial Sequence
  Oligonucleotide
tgataagtgtctgtgttgtt

SEQ ID NO: 420 - DNA, 21 bp, Artificial Sequence
  Oligonucleotide
ttctgagtagatttattatca

SEQ ID NO: 421 - DNA, 20 bp, Artificial Sequence
  Oligonucleotide
ttctgagtagatttattgtc

SEQ ID NO: 422 - DNA, 19 bp, Artificial Sequence
  Oligonucleotide
ctttcgatgaatgctatga

SEQ ID NO: 423 - DNA, 21 bp, Artificial Sequence
  Oligonucleotide
ctttcgatgaatgttatgata

SEQ ID NO: 424 - DNA, 17 bp, Artificial Sequence
  Oligonucleotide
ctcctaaacgtaactgt

SEQ ID NO: 425 - DNA, 16 bp, Artificial Sequence
  Oligonucleotide
ctcctaaacgtagctg

SEQ ID NO: 426 - DNA, 18 bp, Artificial Sequence
  Oligonucleotide
ccaactacatcatcatgt

SEQ ID NO: 427 - DNA, 18 bp, Artificial Sequence
  Oligonucleotide
ttccaactacatcatgtg

SEQ ID NO: 428 - DNA, 16 bp, Artificial Sequence
  Oligonucleotide
tcagctctgaggatgc

SEQ ID NO: 429 - DNA, 22 bp, Artificial Sequence
  Oligonucleotide
aacaatagtcttcagaggatgc

SEQ ID NO: 430 - DNA, 21 bp, Artificial Sequence
  Oligonucleotide
attagcatatttctctccatt

SEQ ID NO: 431 - DNA, 21 bp, Artificial Sequence
  Oligonucleotide
tattagcatatttgtctccat

SEQ ID NO: 432 - DNA, 14 bp, Artificial Sequence
  Oligonucleotide
tctctatggccgta

SEQ ID NO: 433 - DNA, 15 bp, Artificial Sequence
  Oligonucleotide
ctctctatggtcgta

SEQ ID NO: 434 - DNA, 24 bp, Artificial Sequence
  Oligonucleotide
ctacaataatacaaaatctcaata

SEQ ID NO: 435 - DNA, 24 bp, Artificial Sequence
  Oligonucleotide
ctacaataatacaaaatttcaata

SEQ ID NO: 436 - DNA, 21 bp, Artificial Sequence
  Oligonucleotide
ccctctatttatatatgtgca

SEQ ID NO: 437 - DNA, 21 bp, Artificial Sequence
  Oligonucleotide
cctctatttatatttgtgcac

SEQ ID NO: 438 - DNA, 20 bp, Artificial Sequence
  Oligonucleotide
tggcacatagcaatttttaa

SEQ ID NO: 439 - DNA, 21 bp, Artificial Sequence
  Oligonucleotide
tatggcacatagcaatttaaa

SEQ ID NO: 440 - DNA, 19 bp, Artificial Sequence
  Oligonucleotide
tcaaagatgtactcaagct

SEQ ID NO: 441 - DNA, 18 bp, Artificial Sequence
  Oligonucleotide
caaagatgtactcgagct

SEQ ID NO: 442 - DNA, 18 bp, Artificial Sequence
  Oligonucleotide
accatgttgcaattgata

SEQ ID NO: 443 - DNA, 17 bp, Artificial Sequence
  Oligonucleotide
ccatgttgcaattggta

SEQ ID NO: 444 - DNA, 19 bp, Artificial Sequence
  Oligonucleotide
tcatgctagtgaaacagct

SEQ ID NO: 445 - DNA, 18 bp, Artificial Sequence
  Oligonucleotide
catgctagtggaacagct

SEQ ID NO: 446 - DNA, 18 bp, Artificial Sequence
  Oligonucleotide
aaatggtcgacttcaaaa

SEQ ID NO: 447 - DNA, 15 bp, Artificial Sequence
  Oligonucleotide
tggtcgacttcagaa

SEQ ID NO: 448 - DNA, 18 bp, Artificial Sequence
  Oligonucleotide
aatcatttttgtaatagt

SEQ ID NO: 449 - DNA, 17 bp, Artificial Sequence
  Oligonucleotide
aatcatttttgtgatag

SEQ ID NO: 450 - DNA, 20 bp, Artificial Sequence
  Oligonucleotide
ttgtcaagacactaatactt

SEQ ID NO: 451 - DNA, 19 bp, Artificial Sequence
  Oligonucleotide
caagacactactacttggt

SEQ ID NO: 452 - DNA, 22 bp, Artificial Sequence
  Oligonucleotide
aacagtgttttctcttaacaat

SEQ ID NO: 453 - DNA, 22 bp, Artificial Sequence
  Oligonucleotide
acagtgttttctcttgacaatt

SEQ ID NO: 454 - DNA, 21 bp, Artificial Sequence
  Oligonucleotide
atatgggatttcaccgttatc

SEQ ID NO: 455 - DNA, 22 bp, Artificial Sequence
  Oligonucleotide
aatatgggatttcatcgttatc

SEQ ID NO: 456 - DNA, 17 bp, Artificial Sequence
  Oligonucleotide
aacacaaccgcttgtac

SEQ ID NO: 457 - DNA, 18 bp, Artificial Sequence
  Oligonucleotide
aacacaacctcttgtaca

SEQ ID NO: 458 - DNA, 17 bp, Artificial Sequence
  Oligonucleotide
ttgttatacttggcgtt

SEQ ID NO: 459 - DNA, 17 bp, Artificial Sequence
  Oligonucleotide
ttatacttggtgttggc

SEQ ID NO: 460 - DNA, 22 bp, Artificial Sequence
  Oligonucleotide
aaggaaatggagtattgataaa

SEQ ID NO: 461 - DNA, 21 bp, Artificial Sequence
  Oligonucleotide
aggaaatggagtattgatgaa

SEQ ID NO: 462 - DNA, 17 bp, Artificial Sequence
  Oligonucleotide
caccatttcccaaacaa

SEQ ID NO: 463 - DNA, 17 bp, Artificial Sequence
  Oligonucleotide
tccaccattttccaaac

SEQ ID NO: 464 - DNA, 21 bp, Artificial Sequence
  Oligonucleotide
tagagatactactactacata

SEQ ID NO: 465 - DNA, 21 bp, Artificial Sequence
  Oligonucleotide
agagatactactactacttaa

SEQ ID NO: 466 - DNA, 17 bp, Artificial Sequence
  Oligonucleotide
caagcatctaactgcaa

SEQ ID NO: 467 - DNA, 19 bp, Artificial Sequence
  Oligonucleotide
cacaagcatctaactgtaa

SEQ ID NO: 468 - DNA, 19 bp, Artificial Sequence
  Oligonucleotide
catggtatcatgtagtagt

SEQ ID NO: 469 - DNA, 17 bp, Artificial Sequence
  Oligonucleotide
catggtatcatgtggta

SEQ ID NO: 470 - DNA, 19 bp, Artificial Sequence
  Oligonucleotide
cagcaaacacaccataaac

SEQ ID NO: 471 - DNA, 19 bp, Artificial Sequence
  Oligonucleotide
agcaaacacaccgtaaaca

SEQ ID NO: 472 - DNA, 19 bp, Artificial Sequence
  Oligonucleotide
taaggtaagactacgatgt

SEQ ID NO: 473 - DNA, 21 bp, Artificial Sequence
  Oligonucleotide
ttataaggtaagactatgatg

SEQ ID NO: 474 - DNA, 18 bp, Artificial Sequence
  Oligonucleotide
ccttaattactacaccaa

SEQ ID NO: 475 - DNA, 19 bp, Artificial Sequence
  Oligonucleotide
ttccttaattactatacca

SEQ ID NO: 476 - DNA, 16 bp, Artificial Sequence
  Oligonucleotide
acgtcacttcaaacca

SEQ ID NO: 477 - DNA, 15 bp, Artificial Sequence
  Oligonucleotide
acgtcacttcacacc

SEQ ID NO: 478 - DNA, 22 bp, Artificial Sequence
  Oligonucleotide
ttgttaggaatgcttttgaaat

SEQ ID NO: 479 - DNA, 22 bp, Artificial Sequence
  Oligonucleotide
ttgttaggaatgctttgaaatt

SEQ ID NO: 480 - DNA, 19 bp, Artificial Sequence
  Oligonucleotide
ctgttggagtaagagccaa

SEQ ID NO: 481 - DNA, 17 bp, Artificial Sequence
  Oligonucleotide
tgttggagtaggagcca

SEQ ID NO: 482 - DNA, 18 bp, Artificial Sequence
  Oligonucleotide
tggagatcataggctgtc

SEQ ID NO: 483 - DNA, 20 bp, Artificial Sequence
  Oligonucleotide
atggagatcattggctgtct

SEQ ID NO: 484 - DNA, 20 bp, Artificial Sequence
  Oligonucleotide
aatttccattcaagtttaaa

SEQ ID NO: 485 - DNA, 20 bp, Artificial Sequence
  Oligonucleotide
aatttccattcaagttttaa

SEQ ID NO: 486 - DNA, 18 bp, Artificial Sequence
  Oligonucleotide
aagtcccataagttagca

SEQ ID NO: 487 - DNA, 19 bp, Artificial Sequence
  Oligonucleotide
aaagtcccataatttagca

SEQ ID NO: 488 - DNA, 19 bp, Artificial Sequence
  Oligonucleotide
tctttctgttacactattt

SEQ ID NO: 489 - DNA, 20 bp, Artificial Sequence
  Oligonucleotide
ttctttctgttacattattt

SEQ ID NO: 490 - DNA, 24 bp, Artificial Sequence
  Oligonucleotide
catcatcattaatccaattgaata

SEQ ID NO: 491 - DNA, 23 bp, Artificial Sequence
  Oligonucleotide
catcatcattaatccgattgaat

SEQ ID NO: 492 - DNA, 21 bp, Artificial Sequence
  Oligonucleotide
caatcttattaaataagtgca

SEQ ID NO: 493 - DNA, 21 bp, Artificial Sequence
  Oligonucleotide
gtatgacctagataggaacct

SEQ ID NO: 494 - DNA, 16 bp, Artificial Sequence
  Oligonucleotide
tgtcgtttgacaaggc

SEQ ID NO: 495 - DNA, 15 bp, Artificial Sequence
  Oligonucleotide
tcgtttgacgaggct

SEQ ID NO: 496 - DNA, 1075 bp, Artificial Sequence
  SNP
aaccctctaactatacttattctctgacaaccgtttataaagtttatctaaacaggactttacttagttccaccattcaaaaaaacatgattttgtagcttatgcataagttcacttcaacttatggaggaacttctttcatctctcttcttattttcttctcatataagtactcagggaaaagtttattcaaacagaccctaaaccttgattttactctcaaacatatttttggaacactcccatcgaaaatccagacacacccttaatttcccagcattcaaaaccctcttttagggttccattcacagagcaaacacgttccaaacaaaagaagaccaaagatttcggcactcagagsggaaaagyttygaactttgacactcccaaggagtcactyagaagggtttgtttcgtggggagttttggcgacgatggagagggcgtggaggccgctctggagctcgtcggcgaggaggtcgtagatgagacggtgtcgtttgacraggctctggccctcgaacttgggggagacgatgttgaggttgaagtgggtttctttgtcggaactacccttcacggcggcgtggcccgcgtgctggtacgacacgtcgtccacctccaaaacggtggcttccagcgccgtttgcagcttcgaccgaatcctgctaggcacgagtaaatacatgaatatgtctctgaactttttgagcatttttaatrgtaattaagtccttaatcttcaacaaattttttaaacaaatttctctaagttagtttactacagcttgaaactgccataaaaataacaatatgtggcwgttttaccaactccaagacccaattacaaaaattgtaagagatctaagaacccaattacaatttatttttaatttttttagaaacttcattaaaaattcccaaataattcaatcacctattgatgtattaaccctctaacttatattattctcttacaaccgtttataaagtttatctaaacaggactttacttagttccaccattcaaaaaaacatgattttgtagcttatgcataagttcacttcaacttat

SEQ ID NO: 497 - DNA, 1075 bp, Artificial Sequence
  SNP
  misc_feature (361)..(361): n is a, c, g, or t
  misc_feature (369)..(369): n is a, c, g, or t
  misc_feature (372)..(372): n is a, c, g, or t
  misc_feature (400)..(400): n is a, c, g, or t
  misc_feature (723)..(723): n is a, c, g, or t
  misc_feature (821)..(821): n is a, c, g, or t
aaccctctaactatacttattctctgacaaccgtttataaagtttatctaaacaggactttacttagttccaccattcaaaaaaacatgattttgtagcttatgcataagttcacttcaacttatggaggaacttctttcatctctcttcttattttcttctcatataagtactcagggaaaagtttattcaaacagaccctaaaccttgattttactctcaaacatatttttggaacactcccatcgaaaatccagacacacccttaatttcccagcattcaaaaccctcttttagggttccattcacagagcaaacacgttccaaacaaaagaagaccaaagatttcggcactcagagnggaaaagnttngaactttgacactcccaaggagtcactnagaagggtttgtttcgtggggagttttggcgacgatggagagggcgtggaggccgctctggagctcgtcggcgaggaggtcgtagatgagacggtgtcgtttgacraggctctggccctcgaacttgggggagacgatgttgaggttgaagtgggtttctttgtcggaactacccttcacggcggcgtggcccgcgtgctggtacgacacgtcgtccacctccaaaacggtggcttccagcgccgtttgcagcttcgaccgaatcctgctaggcacgagtaaatacatgaatatgtctctgaactttttgagcatttttaatngtaattaagtccttaatcttcaacaaattttttaaacaaatttctctaagttagtttactacagcttgaaactgccataaaaataacaatatgtggcngttttaccaactccaagacccaattacaaaaattgtaagagatctaagaacccaattacaatttatttttaatttttttagaaacttcattaaaaattcccaaataattcaatcacctattgatgtattaaccctctaacttatattattctcttacaaccgtttataaagtttatctaaacaggactttacttagttccaccattcaaaaaaacatgattttgtagcttatgcataagttcacttcaacttat

SEQ ID NO: 498 - DNA, 288 bp, Artificial Sequence
  SNP
  misc_feature (152)..(152): n is a, c, g, or t
ttgcagttctattctggctatcttgtataatttgggccaracaagtggtgccaagccgataggttaagttgggcagttgactaaaagtcataaaaactgtaacatttcaaaaatccacaaaattacctcaactaattctagatcaaaaatantccacaatctgtaatattgctaacaagattttcagcgctcaagttcactagaatgctatcatttcccgcagagaaaacagtctttgtttttttggagttaccacctgtttttagggggtttcactttataaatacg

SEQ ID NO: 499 - DNA, 404 bp, Artificial Sequence
  SNP
gcagccctttctaccatcaattcatattgagagcaagtgctgctaaggctcttggatcattcaggagcaaccccactatttgagtcaatttcctcttcatggggggttagtggaaatggaaaaaaaaagataattggaggcaaaaaaagttgatattgcaacaataataataataatatggaactgtttgtgctttgatcctctgcagatwgaaggttctttcaagaaaaggaagcctttggtaaatagtaaagaccctttagtacttcgaagcactttcctttgtatttccttgttagaattgatgagcttttttttkatatattggaagtaaaatctattagatatcttgttttaatattttgtgatatgtaataagtcgacttgttggtgacctaagtgtg

SEQ ID NO: 500 - DNA, 404 bp, Artificial Sequence
  SNP
  misc_feature (194)..(194): n is a, c, g, or t
cacacttaggtcaccaacaagtcgacttattacatatcacaaaatattaaaacaagatatctaatagattttacttccaatatatmaaaaaaaagctcatcaattctaacaaggaaatacaaaggaaagtgcttcgaagtactaaagggtctttactatttaccaaaggcttccttttcttgaaagaaccttcnatctgcagaggatcaaagcacaaacagttccatattattattattattgttgcaatatcaactttttttgcctccaattatctttttttttccatttccactaaccccccatgaagaggaaattgactcaaatagtggggttgctcctgaatgatccaagagccttagcagcacttgctctcaatatgaattgatggtagaaagggctgc

SEQ ID NO: 501 - DNA, 306 bp, Artificial Sequence
  SNP
  misc_feature (77)..(77): n is a, c, g, or t
  misc_feature (79)..(79): n is a, c, g, or t
ggaattcccaaatagtcgatgcaagaagaaagtctcaaaagtatgaatgttgtaaagrgcaagggtaacgattttcngnaatcctttctttacaagacatgctgacatgaaagtaaaagattcaacatatgaatcgactaactatttccaacaaggaattaagccattgttgtatatttgacatatagataggaaaatggctatggtcctccaagtactgcattctcaatgtcttctctgcttaaagcataactaaacctcctctccatatttttttcaagattcccaggtccactcttcaaatac

SEQ ID NO: 502 - DNA, 306 bp, Artificial Sequence
  SNP
  misc_feature (58)..(58): n is a, c, g, or t
  misc_feature (79)..(79): n is a, c, g, or t
ggaattcccaaatagtcgatgcaagaagaaagtctcaaaagtatgaatgttgtaaagngcaagggtaacgattttcwgnaatcctttctttacaagacatgctgacatgaaagtaaaagattcaacatatgaatcgactaactatttccaacaaggaattaagccattgttgtatatttgacatatagataggaaaatggctatggtcctccaagtactgcattctcaatgtcttctctgcttaaagcataactaaacctcctctccatatttttttcaagattcccaggtccactcttcaaatac

SEQ ID NO: 503 - DNA, 501 bp, Artificial Sequence
  SNP
  misc_feature (18)..(18): n is a, c, g, or t
  misc_feature (21)..(21): n is a, c, g, or t
atgtaaagctgccttganggncaattctctgctgctaattgcataagacatggatgaaacacataaaatagtggaaacaaatactgtaagaagtgaaaacaaccacaacgacgatcttgaaagttgtttcaactgaagacttacacttaagccaactaagaaccatctgaatccatgaaaaagttctagcacccacccattaagtggaaaaagagtgtagctcttccttatgttctctaaaacccaaatgsctaagcacaaatgcaacaaccccagagagccattggtaacggcagaaattagctgcaagtttgaatatctttccacgcaaaactgaccacgaaatggtctgaacaaagacttctggatcaaaatgaatcccaacatgaccagtagtagcacatcaacgcaaatgatcaagaactggttaatgcatgtagaaggatctttcaaaaactttaaatcatggcaaaaagtctttccccgggtcccaggacaatc

SEQ ID NO: 504 - DNA, 1001 bp, Artificial Sequence
  SNP
  misc_feature (87)..(88): n is a, c, g, or t
  misc_feature (125)..(125): n is a, c, g, or t
  misc_feature (375)..(375): n is a, c, g, or t
  misc_feature (378)..(378): n is a, c, g, or t
  misc_feature (382)..(382): n is a, c, g, or t
  misc_feature (897)..(897): n is a, c, g, or t
  misc_feature (954)..(954): n is a, c, g, or t
acagcagcattcaagataaggtcttcaaatattcaaatatacatttcagtatactaaaggttctgcagagaaatggaaaatcctttnngcttttataccatacaggttaagtcatgttgcaatanactaaaacctcaattcatttctgactgtaacattgggaagaaagcccagctgttggctgatctaccttccttcccagcaaccttcctgttagtccaccactcatagccactgccagtagtaacagaaacatcacctttcctgttgtcaaaattgaattctttggaagaatttacagaattttgcttgtgaaggcattgctctccttttcctacaggattgtcaggcttatcgtcagttttctctgtacangcnttanagctactattggtgtctatttgcaccctttctctgtcaacagggtctttggtcagtataccttgtgaagaccctgacatgtttcgaagcaataccccagttttatttgcaagacaccgrgcaacatcttccccggttaattcaaatgaaactctgtgatcaaccaatgttgcattgcttggatgtccattgtctgaatctgcaagagttgcttccttagaaatctggttttgcacagagatgttgttttgattggttggcccagcactgtcaggtgtcaaacagccagaacctaacctggattcctgccccagaccatcaggtgtcacacacccagagcctaatcgcgaagcaagcccaacaccatcaggagtcaaggatcccgaacctagtcttgaaccttgccatgcactgtctggcgtcaatgatccagatcccagtctagaaccccatcttcgggtggagaagtgttcaacacccaagatctttggtgtttcccctttggggaattcaagngtagggggtctatcagggaatggggttgaggtgccagaagttgaaaatgctgatccnggtgatatgagctggccacctgggcttccaggatattgttgataagg

SEQ ID NO: 505 - DNA, 1007 bp, Artificial Sequence
  SNP
  misc_feature (327)..(327): n is a, c, g, or t
  misc_feature (455)..(455): n is a, c, g, or t
  misc_feature (482)..(482): n is a, c, g, or t
  misc_feature (778)..(778): n is a, c, g, or t
  misc_feature (802)..(807): n is a, c, g, or t
  misc_feature (836)..(836): n is a, c, g, or t
  misc_feature (880)..(880): n is a, c, g, or t
  misc_feature (946)..(946): n is a, c, g, or t
aagaagggatcattgagaagctttgcttgcgtagccctttcaaatttacatgattgattttttctgtttctgctctaatttttgaaacccacttgggagaatgcgagctgaactgagttttgggaatagtattatgacatggtcattttgaagagatattctgttgggagaatgctgcctctttcattgtttgggcatctattatgccctacccattatagtatcattcttccgtagcaggtcaagatttttaattaaagtaagggagaggtcaataatctttcagtatgatagggttgattttgtaagtaactggaaagtgcaatngaaaaggcaatttgagatgttatgtgttgcaaaagaatggaaatacaagcaaaacaaaaagaaagtatggatggctttagtggttcaatttgaggtgtcatcacaagttaagaattggttcaccaganagagatttgtagatactatattgagtncactgtattatgtatttamgatggtggcgtagttaggaaaggatataaacattcaaagtttaatagattgattaagtgttttctagagatgttcttcacctttttcggctgtttaatgtgtattgaatataaatattttcccgcttaagattcttttcagaagacggtcatttctttttattctcatatgcttgatttattctcatagtcgtttttaataatattaacaatcaatttagcagctccaagaaaaaattatgtcaatatcttttcgtcttaatttataaaattgcctncatacgtaatataaagatagttgnnnnnntttattcttgaccatgttttaatattaangatgatgaaagaaaaatacaagtaaaacactatttaacaaattngtttcaaagtggcccaatatgtgtaatggtgtgacaccggtggctagtatcttgaactttttaaangatttcaattcttaattattcaaataaagtaacatttgtgggaagaaaagttgtctcttaa

SEQ ID NO: 506 - DNA, 1001 bp, Artificial Sequence
  SNP
  misc_feature (8)..(8): n is a, c, g, or t
  misc_feature (43)..(44): n is a, c, g, or t
  misc_feature (46)..(46): n is a, c, g, or t
  misc_feature (78)..(78): n is a, c, g, or t
  misc_feature (80)..(80): n is a, c, g, or t
  misc_feature (83)..(83): n is a, c, g, or t
  misc_feature (110)..(110): n is a, c, g, or t
  misc_feature (215)..(215): n is a, c, g, or t
  misc_feature (248)..(248): n is a, c, g, or t
  misc_feature (257)..(257): n is a, c, g, or t
  misc_feature (269)..(269): n is a, c, g, or t
  misc_feature (272)..(272): n is a, c, g, or t
  misc_feature (287)..(287): n is a, c, g, or t
  misc_feature (290)..(290): n is a, c, g, or t
  misc_feature (301)..(301): n is a, c, g, or t
  misc_feature (327)..(327): n is a, c, g, or t
  misc_feature (341)..(341): n is a, c, g, or t
  misc_feature (365)..(365): n is a, c, g, or t
  misc_feature (368)..(368): n is a, c, g, or t
  misc_feature (380)..(380): n is a, c, g, or t
  misc_feature (395)..(395): n is a, c, g, or t
  misc_feature (410)..(410): n is a, c, g, or t
  misc_feature (425)..(425): n is a, c, g, or t
  misc_feature (431)..(431): n is a, c, g, or t
  misc_feature (452)..(452): n is a, c, g, or t
  misc_feature (482)..(482): n is a, c, g, or t
  misc_feature (509)..(509): n is a, c, g, or t
  misc_feature (575)..(575): n is a, c, g, or t
  misc_feature (694)..(694): n is a, c, g, or t
  misc_feature (749)..(749): n is a, c, g, or t
  misc_feature (863)..(863): n is a, c, g, or t
  misc_feature (865)..(865): n is a, c, g, or t
  misc_feature (872)..(872): n is a, c, g, or t
  misc_feature (883)..(885): n is a, c, g, or t
  misc_feature (989)..(989): n is a, c, g, or t
  misc_feature (992)..(992): n is a, c, g, or t
attacgcnattctggaagccgcatttgaggagaaaacggagannancaggttctgcgtggtggattttgagattggananggnaagcagtatttgcacctcctcaacgcnctctcggcgcgtgaccagaacgcggtggtgaagatcgcggctgtggcggagaacggcggcgaggagagagtgcgcgccgtgggagacatgctgagtctactcgcngagaagctgaggatcaggttcgagttcaagatngtcgcgacncagaaaatcacnganttgactcgcgagtcnctnggatgcgaagnggacgaggttctcatggtgaacttcncgttcaacctgaanaagattcccgacgagagcgtctcnacngagaatcctcgngacgagctcctgcgncgcgtgaagcgtctngcgccgcgcgtggtnacaatngtggagcaggagataaacgcnaacacggcgccgtttttggcgcgcgtggcngagacgctgtcgtattacrgcgcgttnttggagtccattgaggccaccactgcagggagagaaaataacaataacaacctagaccgagtcagnctcgaggagggactgagtcgaaaattgcataactcggtggcgtgcgaaggaagagatcgcgtggaacggtgtgaagtgtttggaaaatggcgcgcgcgtatgagcatggcggggttcgngttaaaaccactgagtcaaagcatggccgagtcaataaaatcgcgactcaccacngccaacaaccgagtcaactcgggactgactgtaaaagaagagaacggagggatttgctttggttggatgggaagaacactcacggtcgcatctgcttggcgttaactcggctcncnttttttnctttttttttnnnaatttggttcggaatattattatatatcacattgttactatattttaacgtcatctagagataatggaaaggccatagatttggaaaatgattattattattantantattattat

SEQ ID NO: 507 - DNA, 1001 bp, Artificial Sequence
  SNP
  misc_feature (9)..(17): n is a, c, g, or t
  misc_feature (93)..(93): n is a, c, g, or t
  misc_feature (99)..(99): n is a, c, g, or t
  misc_feature (201)..(201): n is a, c, g, or t
  misc_feature (309)..(309): n is a, c, g, or t
  misc_feature (333)..(333): n is a, c, g, or t
  misc_feature (345)..(345): n is a, c, g, or t
  misc_feature (347)..(347): n is a, c, g, or t
  misc_feature (363)..(363): n is a, c, g, or t
  misc_feature (365)..(366): n is a, c, g, or t
  misc_feature (404)..(405): n is a, c, g, or t
  misc_feature (414)..(414): n is a, c, g, or t
  misc_feature (447)..(447): n is a, c, g, or t
  misc_feature (456)..(456): n is a, c, g, or t
  misc_feature (486)..(486): n is a, c, g, or t
  misc_feature (522)..(522): n is a, c, g, or t
  misc_feature (570)..(570): n is a, c, g, or t
  misc_feature (612)..(612): n is a, c, g, or t
  misc_feature (616)..(616): n is a, c, g, or t
  misc_feature (618)..(618): n is a, c, g, or t
  misc_feature (675)..(675): n is a, c, g, or t
  misc_feature (777)..(777): n is a, c, g, or t
  misc_feature (864)..(864): n is a, c, g, or t
  misc_feature (930)..(930): n is a, c, g, or t
  misc_feature (999)..(999): n is a, c, g, or t
ttttttttnnnnnnnnnattgcacttaccctagcaatttcatgcttccaaaagaaaatccttgtcttgctccaacctctccatagcctcaggntccaangttagttccacatcaatgctcctccctccactcttccccgggtacaaataaatcatcccatcaaacttgttattagttccactcctcacattctctggcttnccccacccaaaatcaatgtcataaaccttaaaccttggggagcttccaacagccacacaattcaccccagcatctttgaattgaaaaattttgggtgtactctcccantccttgttacgttcatcaattgcnttagcattgtgngnttcaatggctttctgnannaatgaagccccaaattgtggcggatgggcggctaatannccaaccgcngtaacggtaaaaatagcttgaattaggtttccnaaataattntccggcattggtgggtccacccgcttccgncaatcggcgaagacrgtgaacaccgtgtagtcctcnggcttcaagttacgtgcatggcttacatggcgccaaacgtgggagganagagcctgaaatgttgagaatggttttgagccatcggatggngggntntcgttgaccgttgacttgatcttgtcgatggctgactcggagaatttgaagatcttntccctaagtgctggcgcgggctttgcctcaccgttggaagttggtgggccgttgggctcaggaagcgagaggtccaatttcacgcgtgtgttccgggccttngttcggtccaggaagggtggtgctgacgtggagggtgaaccgctgcagatctcggcccatgaggtcatgaattgccaggtggcagtnccgtccaagacagcatggttgaatgctaggcccattgcaagcccatctttgagcttcgttaactgngagcaagaatagaatgcaaatgaagtgagaacatgaaaaataaaaataaaaagatatcatatgatttanaa

SEQ ID NO: 508 - DNA, 601 bp, Artificial Sequence
  SNP
gaaaaatgaacatattaacaagaacgttattgctagtgagataatcaacatagattatggacaattacattattacaagtttccttatccttcaccatactatgccagatgtcagatgatcctcataagtacaaatatatatatatatatcaaaggaaatgacatatatacctttatgatgcaaactaactaaagcaccattttggattctgcaaaggtaattaaggaacatgaaattaaactatgtcttgcttcaaagaaattgctaccctttctagttaattataccggatctgctatsactagagagacttctgatgatgatgatagctattttatttcactcagttatgaagtgggtttggtccacctggagtagctgtatgtgaaacagtatgaaatccactgaccttgttgtctttgatttcagcagaattataactatgtgggaatgaagaaaaggggatgctggttcttgttctttgttccatgatcttttccttatccccccaggaaatgtgcctgcagcttgaaagatggagcagtattactagtataaaaagaaggaacataataattagaaatctagatttatgaactc

SEQ ID NO: 509 - DNA, 1001 bp, Artificial Sequence
  SNP
  misc_feature (12)..(12): n is a, c, g, or t
  misc_feature (39)..(39): n is a, c, g, or t
  misc_feature (258)..(258): n is a, c, g, or t
  misc_feature (286)..(286): n is a, c, g, or t
  misc_feature (326)..(326): n is a, c, g, or t
  misc_feature (363)..(363): n is a, c, g, or t
  misc_feature (367)..(367): n is a, c, g, or t
  misc_feature (372)..(372): n is a, c, g, or t
  misc_feature (547)..(547): n is a, c, g, or t
atccaggagacntgcccaactatgatgatgctaagccantacaccttaatactgagcaacatgatgaaataaccagttcaagtggaagtgtaagttttggttttcctgaaacctattctagttcgggtgctgataatgagactggaattgttagtgttgtggtcatttctgagctaaataacatgatttcagatcctaagtttttcaatgaagctggtcaagagaatattctgtcagctttaaagaatgaaaaccttnacctgaacaaaattccacaggtctccgntgagggaaatgagccttcctttgaagagcggagcattccnggaaatgacctgtttgaaaaatcatctatttcaacancagncaatncattggtagatgagcaggttagaaatgataattatgaggttgatgaagttaaatctgaatcttcaaattctggatcctttttctctgttcccggcattcccgctccattagtagtttctacagctgtamaagtgcttccgggaaagattttggttcctgcagctgttgatcaagntcagggccaagcactagctgcattgcaagttttaaaggtagttatttgttcttattctcatgtatcaaggtgactataatgctatgtgcatttatagtttaattctagtttttacgtatatatttacactggttatttcttaaatctatttaattactcacaataaaaaaagatgacccggagtacaaggttcctgggaagggtagagcctatttccaggatttgaacccatgacctctaggtcacaagatagcaatgtcactgttgcaccaaggctccccccctcccagtgggcatactagcttaaacttcagccatcttgattcactgtgatttgtactaagctatactctaacctattgccaaagattttctacaaggaacaatctatcttactgttgaagtaactaaaatcaataatttctggtagccttatgcttgttcccaggtcaac

SEQ ID NO: 510 - DNA, 501 bp, Artificial Sequence
  SNP
  misc_feature (170)..(170): n is a, c, g, or t
actgatatggctgaagctgatctgaataccacagacttgttgcccctatcacatgacatagaacacactgggttaattcagaatactagcagtgaggtggtttccagtatagataaaaatgagatcatagatcttctgagcccttccccacctaagaaatccaatttatnctcaaaatgtcagcaatcaagtgaccaacatattgaagtgattaatttgagtgattcagaaaatgacatgtccgttgaacrcaagcagaaagcgaaggagctgagattgttcttagctagtattaggaatgaaattcattgaacaatgtttgtacaagtaatataaaagcaggttttattagtattgatatcacacattgactagaatttagtacttacaagattgacaccctccccaactttcaattcggttttgtaagatttagttagattgaaagtccaacttttaatagtgtaattaaaaaacaaatgagttaccatttgtgatctt

SEQ ID NO: 511 - DNA, 1001 bp, Artificial Sequence
  SNP
  misc_feature (26)..(26): n is a, c, g, or t
  misc_feature (55)..(55): n is a, c, g, or t
  misc_feature (87)..(87): n is a, c, g, or t
  misc_feature (104)..(104): n is a, c, g, or t
  misc_feature (270)..(271): n is a, c, g, or t
  misc_feature (275)..(275): n is a, c, g, or t
  misc_feature (283)..(283): n is a, c, g, or t
  misc_feature (298)..(298): n is a, c, g, or t
  misc_feature (345)..(345): n is a, c, g, or t
  misc_feature (417)..(417): n is a, c, g, or t
  misc_feature (445)..(445): n is a, c, g, or t
  misc_feature (568)..(568): n is a, c, g, or t
  misc_feature (577)..(577): n is a, c, g, or t
  misc_feature (644)..(644): n is a, c, g, or t
  misc_feature (791)..(791): n is a, c, g, or t
  misc_feature (838)..(838): n is a, c, g, or t
  misc_feature (850)..(850): n is a, c, g, or t
  misc_feature (867)..(867): n is a, c, g, or t
  misc_feature (916)..(916): n is a, c, g, or t
  misc_feature (922)..(922): n is a, c, g, or t
  misc_feature (942)..(942): n is a, c, g, or t
aatcatgaaaacggtatcgtttcganggagtagcaggacaacttgaaaagatacnatagaaaaacgaagtcgtaatggtgtctgatnattttaggaactaaaanagtgatatgctatgattgtactacaagtgtagtggcagaaagcaaatttctatctcccggaaattaaccaaaaaagactacgactaaaactaaagagactaaggaaaataagataaacaaatattacttgtcaactttaccttgaaggcctggtgtagaaggattnnccgncattggcnattgagtttcttcancactacccctgtaaaattggaacaattcaaacctgagattgcagctnggatataaaactcttccccctacgcttcccaagcggaaccatggaatttttccatttatatcctccagacanttcttacaaccatcactagacaaatccngcgtgcattgagcaagagtatacagagtttgcaaatcagtcaattttaatgatttsgtgacatatctctcagtggtatcccctgcctcttgggccagcttaactatggtatctgataatgtanaagtgaagnagtcttgcccggggatgatgctggtggaggaactggtaagattcagcatgtcaaaatttggactttnttccacttctgagaagaaatacagattggaatatcgaatcatgcagtggctgtaccaaatgattccctcttgaactgaattacacactgaggatattcggtgggttgcgttgaggacgcattgttggcagagttgagagggaagatngcctcggcacatgaagaggccatacacagtgttctctacgttgtccntgtaagattttntcccatttgtggcattngaagacaagtaaaagagaagggtcttgagatacatttggaaagtgctgncaacanttacatcggttgggcaactntggtttagataagttggatcttctgaaaattgtgaatccgcatcgggaaaatttgttgc

SEQ ID NO: 512 - DNA, 414 bp, Artificial Sequence
  SNP
  misc_feature (2)..(2): n is a, c, g, or t
  misc_feature (11)..(11): n is a, c, g, or t
  misc_feature (82)..(82): n is a, c, g, or t
  misc_feature (331)..(331): n is a, c, g, or t
  misc_feature (361)..(361): n is a, c, g, or t
tntgaaaaaantaataaagaaaaataacatatattaatatttgatagtagtgtttaacacacaagatattattagcagcacnctatttaatatactctttctaaaacactttattattgttgaaatttatgaaaaattacaaaatcttgttaacccctctttccaatatttaatacaagattcagtcatttttaataaatttcatttaataataaaaagtatatttgaggaagaatctatagatatttgtgtattrttactcttaccggtttgacctccaaggaaattctgccagaggtagtttgcaagttgagtggcatcatcagctganctgagggagtagcttccagcaccaccaccnagggagagcaacactttgatgccaaggtcttggcaagttttgatgtcacagtt

SEQ ID NO: 513 - DNA, 293 bp, Artificial Sequence
  SNP
  misc_feature (28)..(28): n is a, c, g, or t
  misc_feature (87)..(87): n is a, c, g, or t
cttataaaagccacaagcaaattcctcnaagatgccgaaaacaaaccaatttaccagagtacaaaagtgtgaacggatcataataancatgrtgaagaaaggaactacatacatacaaatgatacaaaaacagtgattcatttagttttcttgaatccacaaaatgaaactagacagtggattttatttcatcgatcactgtctaagaaccattagcttgaggagttgaagacttctttccctcgatgtccatctcttttacactatcactcagtgaagacgactcacatttc

SEQ ID NO: 514 - DNA, 537 bp, Artificial Sequence
  SNP
  misc_feature (42)..(42): n is a, c, g, or t
  misc_feature (88)..(88): n is a, c, g, or t
  misc_feature (238)..(238): n is a, c, g, or t
  misc_feature (428)..(428): n is a, c, g, or t
  misc_feature (452)..(452): n is a, c, g, or t
  misc_feature (485)..(485): n is a, c, g, or t
  misc_feature (509)..(509): n is a, c, g, or t
tttttctctcccctcaaggcaaataacatgagacggaaaaanggaggagaaaaagtgaaaaacaagaaagtgagaaattagatagtancacttctcaatcagacacaccattaagccactaccaaaactaaacaaaactttgcaccagccagaagacagttaacattaacaacaacgcaaataaggaaaacatatacaatgcgttagctgagcaaaatttgcgtcaagtatgctgcantttaggcacrgcatgaagcaatccgattaacaagtcaagtcttctatccgcttagcagacaagagatgatctcaaagatgtaggtagttgagtgcatgatgaccaacgaatgactgattcagtcaccataaggtcaagttgctcacactcacctagtccaattgtcctgtttctcttgctgtggattccnaataccttatgtccattcattccncttgcccttttggcctctacaggcttgcgatcngtttctttaacctcacgtccaacncaaagaggagaatcttgtagcataagca

SEQ ID NO: 515 - DNA, 1238 bp, Artificial Sequence
  SNP
  misc_feature (294)..(294): n is a, c, g, or t
  misc_feature (415)..(415): n is a, c, g, or t
  misc_feature (914)..(914): n is a, c, g, or t
  misc_feature (1095)..(1095): n is a, c, g, or t
acttcacaccacagggcgatgatgtgcctggcgaggttgattataacctttaggagaagcaccacaagcatcttgagcaccttggggaacttggtgctgcggctgccggtgcttatgccttggtaattaattatatatcttccttcaataatatattttgttcacgatcgtttatttaatttgaaatagatttatatattacttatgtgagatgattcacaccccctttttatatattttagctttaaaatgttaccttcaccagaataaataaaagaagtgcaaactctttgntaatcgagggaaatatatatacctcccccacatatacatcatcacttagacttggacgtatctaaatcggttaattttaatatgtttatatgtatgcgtgtgcattaataattttcatatntttttttgtaagcattttaaagccttacatattgaaaaaattgtcattaatttgtgttttggacatgaattaatcctatcatcttgaatcatgtccacaaataatttcaatttgacattttctttttaaggcggccaacatatatacatacttgatctttgtacttttggattgtgatgctttaataattgtggataatagatataaaaatatattatagctatatagtattatttcwctctacccactgtgtgtaactatactgtctatacatctcatgtggtttgttttttcttaaatgaaaattgttggggtcatgggtgtatagagtatagtacttttatgacgccatcagaagagaaacaataaaagttcataaaaaattaggtgtagaaaaagatggaacttaagaaagaaaaaagagagagagaaagtgattaagtgatgtaatatataatgagaaatgaagaaaaagataggaagacaaataaagtaaaanaaagaaagaaagaaagaaagatatataacaaaaaattgaaatgtatattctaatatgtattgaaaacaaaattgatccctttttgctgcaatggttaattttatgacagcatgagaagcatgaggccaagaaagacccagagcatgctcacaggcacaaggtagaagaggagattgcggcngcagctactgttggtgctggtggttttgtcttgcatgaacaccatgagaaaaaggaagttaagaaagaggatgaggaagctcatggaaagaagcaccaccatcttaagggtgaacatgataaatattcatatataattatatc

SEQ ID NO: 516 - DNA, 1238 bp, Artificial Sequence
  SNP
  misc_feature (294)..(294): n is a, c, g, or t
  misc_feature (415)..(415): n is a, c, g, or t
  misc_feature (653)..(653): n is a, c, g, or t
  misc_feature (914)..(914): n is a, c, g, or t
acttcacaccacagggcgatgatgtgcctggcgaggttgattataacctttaggagaagcaccacaagcatcttgagcaccttggggaacttggtgctgcggctgccggtgcttatgccttggtaattaattatatatcttccttcaataatatattttgttcacgatcgtttatttaatttgaaatagatttatatattacttatgtgagatgattcacaccccctttttatatattttagctttaaaatgttaccttcaccagaataaataaaagaagtgcaaactctttgntaatcgagggaaatatatatacctcccccacatatacatcatcacttagacttggacgtatctaaatcggttaattttaatatgtttatatgtatgcgtgtgcattaataattttcatatntttttttgtaagcattttaaagccttacatattgaaaaaattgtcattaatttgtgttttggacatgaattaatcctatcatcttgaatcatgtccacaaataatttcaatttgacattttctttttaaggcggccaacatatatacatacttgatctttgtacttttggattgtgatgctttaataattgtggataatagatataaaaatatattatagctatatagtattatttcnctctacccactgtgtgtaactatactgtctatacatctcatgtggtttgttttttcttaaatgaaaattgttggggtcatgggtgtatagagtatagtacttttatgacgccatcagaagagaaacaataaaagttcataaaaaattaggtgtagaaaaagatggaacttaagaaagaaaaaagagagagagaaagtgattaagtgatgtaatatataatgagaaatgaagaaaaagataggaagacaaataaagtaaaanaaagaaagaaagaaagaaagatatataacaaaaaattgaaatgtatattctaatatgtattgaaaacaaaattgatccctttttgctgcaatggttaattttatgacagcatgagaagcatgaggccaagaaagacccagagcatgctcacaggcacaaggtagaagaggagattgcggcrgcagctactgttggtgctggtggttttgtcttgcatgaacaccatgagaaaaaggaagttaagaaagaggatgaggaagctcatggaaagaagcaccaccatcttaagggtgaacatgataaatattcatatataattatatc

SEQ ID NO: 517 - DNA, 771 bp, Artificial Sequence
  SNP
  misc_feature (381)..(381): n is a, c, g, or t
  misc_feature (646)..(646): n is a, c, g, or t
ctttgggctgcacagaaggggcaaaagaagacatagaaaataaaaaatctacggatggtcgcagtcaaggagatttgtttgaagagaattttaaagaactgaagaaatgggttaatgtgaagtcaactaaatatgggatccttttagtaactcgtgagaggcgagctcaaaggcttgggactgcgttgaaggtattttgttttacaagtcttgcactggttgctgcatgtaactcatctatttatttattactaatttactaataaaatatcatatgacactggagtctacttgagtatgtggactcgatagtcgataatattctttgatcctcagtgagatttgccttgaagtattcactcagcttatagtagataaacnaccaaactacttacttctgaacctcttctcacttgattcaggtactgtgtgacataattcaagatgacgcagagcctgccaagaagaaattctatgaccttaagctctctttgcttgatgagattggatggacacatttggctgcatatgagagacaatggatgcatgtgcgtttccctccaagcttacctcttttctaggacctgcccatcgggaagatgctggacagcaatgttaggactttggaaccrtgtccttttcctcnatatttatgtaacactagaccctttacgtgacctatcctttctttttgtgaacatcttggccttggtatttcgaacatggcatgggaactttgccatgccttcagtgtggctgccacatcagtgg

SEQ ID NO: 518 - DNA, 538 bp, Artificial Sequence
  SNP
gatcccacatcaactagtgataytaccaaaataatatatataagcgaggaacaacattcrtctagtgagctagcttstgaggttgagttaggttcaaakacgaatgttagraattctactatcactaatattggtgatgrggttgttgcgtyggaragaaacctttcraggtcgaactcgacggggcattcccttgtggaggagcaagggaagggtgtggagaggtacacgttgaggttgcccgaagatgtgaggaggtacattctagtgaaccatggaagaastgttcaacgttccgcgagtgttaarggggggtgttggagtgacagcgaagagagttacgtggggaagagggtggagaagaggtgggtgatctgcacgccgccatttgtggcgcaacatgrttgaagaatttcgtcgaacaattggtctgcgttctgcgttgcgccttctataaagggtcgttgtcaattcttgcaagagattgtgagagtttggtgttacagagatgaagcagaggactgaaatggaagaagag

SEQ ID NO: 519 - DNA, 490 bp, Artificial Sequence
  SNP
aagctttccttgcacaaagtaagctttgtcacttcatgcctttgctgccctttttgatcaaatgcttkgctgggtcttcaattaatatttgcctaatcaaaactattttcatgcagggtggaaggaagctatctcatcagaacatgtgacattggttatttgccccgactcggaacctcctgggtgcgaggagatacaggatttgaaaacagcagcatgtcaatcttctgatatggatggatgtgacattgtggcaaatgcagataaaagattgcctgcaacctccaaagttgcgaaatccaaacccaggttgaagaagtctgaaaagggaaccaagataaagtatattccraaacagaagacaaatacctagtgtgaaagaataaattggagttgttagtaaggcagatatacagagtttgactttgttgccaatttattaaagagaggtccaagttttaccggatggtcttctgtcagaatgtgaaag

SEQ ID NO: 520 - DNA, 201 bp, Artificial Sequence
  SNP
gacacgaatgccatccaacataaaaatgatgcgatccagtgattgtaaccccaactgacaaacacaatttttgttttaaatgaaaactaccatcacaatawgcatatagaaattgattaaaagctcaaattcaagatacttccttatcttcctgaattccataaaccaaaactaagcatgcaccatcttgagcagacagac

SEQ ID NO: 521 - DNA, 201 bp, Artificial Sequence
  SNP
ctttgataatcgagggaaatatatctccctcccacatatacatcatcacttagaattggacgtatgtaaattggttaattcagcccaagacaaaatggacmaagtgcgccaacaaagatagagttagctatagcttaactgcacgtatcataaaatttgtttaaagtaattacatagatagcaaaaaccagaagaactaaa

SEQ ID NO: 522 - DNA, 201 bp, Artificial Sequence
  SNP
cacaaagagaatctttgttacccctgatggtaatctttgaaaaatatacttccaaaagctctctccttaaggggaaaatttgggtaaagatgtgtattttractttgatctatctctcttaatgaacctatacccaaacattgaatctgtcccaaatactcacggttctaaacaagacctggcacataatcttatttgaat

SEQ ID NO: 523 - DNA, 201 bp, Artificial Sequence
  SNP
gggccctccaatttgttattagaacaatccaactcagaaagttgagttgagccaaataacgaagatgggatcgggcctccaaaattgtttccctcaagatwgagagtattcaatttgtttagcctggcaaacacatctgggatttgaccaataaatttattatgtgaaagatccaggtgaatgagatgttgaagatttgaa

SEQ ID NO: 524 - DNA, 944 bp, Artificial Sequence
  SNP
tcttgatgtggaaaggttcagaacgaatattcaaaactaaagtgttactacttgtaaaaagcattgatctctcaagcaatcacttttctggagaaattccacaggaaatagagaatttatttggattggtttcattgaatttatcaagaaacaatttgatagggaaaattccctcaaaaattggaaagctaacatcacttgaatctcttgatttgtcaagaaaccagttggctggttcaattcctccgagtcttacacaaatttatggcctcggcgtgttagatttgtcacataaccatctaactggaaaaattccagccagcacacagttacagagtttcaatgcctcgagttatgaagataatcttgatctttgtggacagccacttgagaaattttgtattgatgggagacctacacaaaaaccaaatgttgaagttcaasatgacgaattttcacttttcaatcgtgaattttacatgagtatgacatttggatttgttataagcttttggatggtgtttggctcaatcttattcaagcgttcttggagacatgcctatttcaagttcttgaacaatctatcagacaatatttatgtcaaggtagcagtatttgctaataaaatgtcaaaggtgtatggctgaagcttaactaggtaataatattgcagccctttcatatatatatatatatatatatagtttcttttgctttcatatagtttatatacatgaaagattccatatatattataatttggaattgtgacagtaagatttcataatttttaactattttagtataataaattttgaagaaatattgaataagttatattaagattaattaataatataaaattatattgttactgtataatcattaaaattatcattattgatgtataataagcctgaaacatcgttgatctctattattat

SEQ ID NO: 525 - DNA, 501 bp, Artificial Sequence
  SNP
  misc_feature (462)..(462): n is a, c, g, or t
  misc_feature (474)..(474): n is a, c, g, or t
caatgtacaattatattatctttcaagacatcaggattttggaattgttctagtttagaggagaaaagtcatctagtttataactacactgtttttgaattttagcatctatcaatttaagtaattataatatttgatagatgaattatatagtcagttatattaatagaaagcagagcttaaaagggacagtaaaacagaaagttgcaatatattcaccaaagacaacagccttgtcctctcaaccaacmaccatgaattcaggtcctagcgaagacggacacacctcatgaaaataaataaaaaattaaagaaaataagtatctttagttcagcagttaagctaaccaacaaaaacaaaccaaagtataatctcacaccaaaatatgtataacattgatccagaaaatgtcttaatattcccatttcttcaactccatgccatcaggagcacttccctcnaccttctttgancccacttctttccagtttgtagacagc

SEQ ID NO: 526 - DNA, 601 bp, Artificial Sequence
  SNP
  misc_feature (115)..(115): n is a, c, g, or t
  misc_feature (505)..(505): n is a, c, g, or t
  misc_feature (585)..(585): n is a, c, g, or t
cgctgccaacacctccaaggcatcatcggattccgagaatttcgctgagtcggtgatcaaggctcctaagcaggcctctggggagcacaagaagaaaaagaagatcaaagtgacnttcccatcaggtcaagagcggaatgcaccatcacaggcaattaggaaatgcttgcactgtgagataaccaagacaccacagtggagggcagggccaatggggccgaaaacactctgcaatgcttgtggcgtgcgctacaagtcaggccggcttttccccgaatatcgccctgcagcgagtccaacrttttgtgcggccatgcactccaactcccataagaaggtccttgaaatgaggaacaagacaggcaccaaatctggctttgcaactgtttctgctgcctcaccagaactcattccaaacactaacagcagccttacccttgaatatatgtgaaagggggaaaggaaggattctagttggagaattctctaattctctttcaagtcntctcttgagtcatgtcttatacaaggttttgaattgcattctacaaactgcaatgttaaaggttttagaggtgtctgcanctgcgttgtggttgcg

SEQ ID NO: 527 - DNA, 2001 bp, Artificial Sequence
  SNP
  misc_feature (556)..(556): n is a, c, g, or t
atggatatttttttaagtgatcatttatctatttgtaattactaaaaacatatttaacttatttattccgtacgtctgaccacatgccaaatcaatttgtttcccacagacacccaccaccacaattcatgtggatatgatgtgaaagcgtgacattattattttcaattatgattacctatttaaatcaactagccaagtgatcaataatattgcactatggtccctcctcttgggtaagacctggtaatcttacggaagtgtctcacttcatacatctatttattacacatagcctatcctaaatcatacgtggcaagttcttactggacagaataggtacttaatgatattttttgagatattcgatctatgttggtaagggaaggaaaacaaacaactcataagcgaaataaaatggacaaaatggatgccccaagccaatagaaattcagatatagatctcgtaaagataagtacccctctcttctttaagctatatattgtgctaaaaaaaaatatataggcatcaccagtagccattctcttcagtttnaagttacatagtttttcattgttttacttaatctacaatggctgcttcaacaatggctctctcttcatcatcattggctggccaagctatcaagcttgccccctccacccctgagcttggtgttggaagggttagcatgaggaaaacagcctccaaaactgtttcctcaggaagcccatggtacggcccagaccgtgtcaagtacttgggcccattctcaggtgagcccccatcctatctcactggtgaattcccaggtgactatggttgggacactgctgggctttctgctgacccagagacttttgccaaaaaccgtgaactggaagtcatccactccagatgggccatgttgggagccttgggctgtgttttccctgaactcttgtcccgcaacggagtcaagtttggcgaggccgtgtggttcaaggccgggtctcagatattcagtgagggtgggcttgactacttgggcaacccaagcctgatccatgcacaaagcattcttgccatctgggccacccaagttatcttgatgggtgccgttgagggttaccgtattgctggtgggcctcttggtgaggtgactgacccaatctatccaggtggcagctttgacccattgggccttgctgatgacccagaggcttttgctgagttgaaggtgaaagagctcaagaatggtaggttggccatgttctccatgtttggtttctttgttcaggcaattgtgacaggaaagggacccttggaaaaccttgctgatcaccttgctgacccagtmaacaacaatgcttgggcttatgccacaaactttgttcccggaaagtgaaatgacttgtgaattttatgttatttagttaaatatgtattggatctatcaagtgagaatgtgaattatattattatattttatatatctctttttagttcatttggatgtatctccaaggttctaagtttatatatatatgcactttattaaccaaactaattaaagctcaaatgacaagtcttaaacattagaagcgagttaggttctaaaatttaaagcagtgggatgaagaaggagaagtagaaatcaccaagacataaatacaagtgctttaaattttgcatttgattctcctcatgtggaccacaaataattttcatcataagcttgagtaggtttactctttttaggttgactttcaagactctggactttattcttcaaactatattagtcagtaaaatcaattaagctttacaaactgccaactgataactgtaaattattattgttctagtgaaaccaaaatgaaatattttattttactctgtttcctttttaattacactctttcagtaaaaataaaatatgccatgttttaaaccttgtatccttattttaatttttatttataaaatacgccagatataaaacaggacgtacattctgt

SEQ ID NO: 528 - DNA, 1001 bp, Artificial Sequence
  SNP
actgtaatcaaatgtgtattgggatttactgtacagctggtctgcagacagtagacttcttttaagtggcagcaaagattcaacacttaaggtaagcataattttccttttctctcaagaagggatatgtatcgaaaacatttttagtttggtttatacacctgaatacatcaattttcatttgctaaacttgaactgagctttcattatgtttggttttcaaggtttgggatattcggactcgtaagttgaagcaagatcttccaggccattctgatgaagtatgcctattcacatgacaacttgagtgtttttttttttcctttcaaatattcttccgttctagtccctgacctaagtctattttcttgctgtaaaggttttttcggtcgattggagtccagatggagagaaggtagcctctggtggtaaggataaagtgttgaagttgtggatgggctaggctaatttttggatgaatattgggaatccaacgaagtrcaatctcaatggagttttgcggatgcatggatttcatggaaatcaatggttggtattatgtggatgcaaggtctttaaattatatagacagcatagaagatatgtttatgacttatcagaaatattactctcatagcaattgagaatataggcactggaagaagttgctcaaagcgagtctcagaacagtggttgaaatgtttggaggcctatcacatgcttgcaagatgttttcttgtctgctttgaagtctttcttggtcttctcttccattaatagttgtaggtggtattgtttttcggtgacaacaatgactataatgggttgaactgtcatagggttcattggtatgaactcagaaatttttgggcagtttgacacacgatgattttttgttggccttgccactttagtagtagtgtttgaatggagtattttaatttgagatgtaagaaaattaagctgtgtccttttcattttataaaattgtgtttggattg

SEQ ID NO: 529 - DNA, 1001 bp, Artificial Sequence
  SNP
  misc_feature (41)..(41): n is a, c, g, or t
  misc_feature (383)..(383): n is a, c, g, or t
  misc_feature (410)..(410): n is a, c, g, or t
ttcttgtttatgaagctaaaataacaaaaacagaaaacatnagcaacgtcaaccaaattcatttatagctctattttactaggtctgtcagaaccctgattccatcattatctacacaagaatcacataataaatgtcaaagcaaaagtaaacaacctgacttcaccttataatccttacaagttaaaatatgcaaattaaggcaatattttcaaagatttcaattatttcgataagaaagcaataattaaaaccaaatctcataaaggagaagcacaagcacccattaaagagtaacaatcataaaaaaagcaataaatgacatgatctatgagaaaaacaatcaaataatagtacaataccatcatcatcttgctccattncttctggctcatcctcagatgacgtcnaaccaccagattgtccagtgcctcttctgctactggaggctacatcattcagagcactccatattgcttcagcatgcatcgtgtgattttsatcatcaatacatgcatcaaaacttcctcgtacaggggatagagaacctagaaaaattaggtaatacatagtcattttcagaagaaaagttgctacacatacaatgtctttttaaactataacaaaagagcaagcctgagaatagaacttcaaaaagagcatctccacatacttatcaacagagttagcttagtatatatgttttagatttacaagtttacaacccaaaccatgcagagggtcaactaaagaagaataaaagcaatattatagttaaaagtagtagataagtcttaaaataaaatcagaagattatttgtatacatagccatatacccatacatgcagacttaattaaatagaaacataaagtttaagtgatctttacatactgtcatcatcaatcataggatgatatggagtcttaggctcagtaattttctgcctcacaggtttgtttgcctcaatttctccaatattagcctcatcccaccttacac

SEQ ID NO: 530 - DNA, 1001 bp, Artificial Sequence
  SNP
  misc_feature (399)..(399): n is a, c, g, or t
attggctttaagactctccaaccccccccccccacacacacacacacacaaaataaaaataaaaatcataactataaactactagcgcgtttggttccacatttgtgatgccattttcacaagctaatagttatatagcttctgcatcctcaacgagtttccaaacaggcaaacatactatactacacaaaactatatatatatataacagatagaaaatgggaaaaataaaaccttcgggttggtcattctcggagaactccttctcgagaacgcgatcgaacatcttggccaaggtgttgttggattcgggcgacgagccattgggcatgttcccgtagaacctctcccgcgtttcctggtcggatctggccgcgccgcaaaccctagcgcagatcncgaggcacaaaacgcagcaccagagcccaaacgcgcgccgtttcttcgtggccagaatcgccgtcttcatcgtcgtttcgatgcgaagtagctgtgcgtgcragtttcgggtttgtttgggaaattgggttctccgcaaaactgggaaaaggcacagaacacggatatggtaaggaaggaagacaatgcagagagggaaaacggttttttctgatttcagaagtttgctacactttttctggttagttgcatttgcgttatagctggtgtgaatgtcaatgtcaatgaaactttattcatttgacacttttgtcaaatgctgagggggggttttgtgtaatttcattaatattttggtgtctgtgtgttttttttataggaataattatgaatgatttttgtatacaataattgtagaagttagaaatattatgatttttaattgattgatattatattatttttataaaaaactatggtaatttttataaaattgagagtttaatttttatgtaaaaagtctattgtcatcatttaattagaaaaatattatatataatatttaaagctaatataggaaagtcaatcatcttttttatata

SEQ ID NO: 531 - DNA, 601 bp, Artificial Sequence
  SNP
  misc_feature (43)..(43): n is a, c, g, or t
  misc_feature (102)..(102): n is a, c, g, or t
  misc_feature (130)..(130): n is a, c, g, or t
  misc_feature (179)..(180): n is a, c, g, or t
  misc_feature (188)..(188): n is a, c, g, or t
  misc_feature (383)..(383): n is a, c, g, or t
  misc_feature (394)..(394): n is a, c, g, or t
  misc_feature (509)..(509): n is a, c, g, or t
  misc_feature (527)..(527): n is a, c, g, or t
atgcattaatggtaatttcaattagattaagaaagtatagtanattcttttgcatgttgggatctgattttgagatttcaaagacaaactcaaactcctatntattcagtgagaggaagctgatatgctntataattctcaggcattgaggactgaatagttgaaacctgaaacatganncataattnatgaaatgtgttggtcatagggtttagtaagagcagacatgattccttggagtacaatattcttttctattaccataaattatgtgttcacgatttcttcttcccaagtaaarcaaactaatagtaatgtagctcctttgtgctgcttctaattaattgcatgccaaagtttgtgttttgaactgttgttgaggnaaaataaaagncctggtatttctagaccaatttccaaggaaaatgtgtatttttcaccaagtagtctcttgttgaagctcaagtgaaaaaatgccaattttatataaatcaccaccaaagcatctnctgcagtatgaaacaaanatcaaattatcataatatcctttttgcctgaaaactccatggttaaaagtaaagatattaataaatgaaaggaa

SEQ ID NO: 532 - DNA, 601 bp, Artificial Sequence
  SNP
  misc_feature (280)..(280): n is a, c, g, or t
  misc_feature (317)..(317): n is a, c, g, or t
taattaatatcattaatatatatttataaattttaaattaaaacacaaatatttaccaaacagttactctgtcaaagctgacatttcagttagttccttggggattgaatgagaaaatttgttatttgagagatccaagacttccaggctaaccaaattatcaaaaattcggggaatataaccactaatgtggttgccactaagattcagtgacacctgcagaatccacggcatgcttggtatcacaccacttagctggttttccccgagttggcgttcnattagaagtttcaagttttcratggatgttggtatgnaaccattcagattgttgccttgcaagttcaacaaagaaagactgctcaaacttgaaatctcagatggaattgatccacccagagaattgcagctcaaattcagtattgacaacttatgaagttggccaatttcaataggaattgcaccattatgcttgttcatttgaagcttcaagacttgaagattggcaagattacctagcaatggtggcaatacaccagtcaagtgattccaatttcctgcaagattccaattcaaccagtatggttccggtcaagtcatt

SEQ ID NO: 533 - DNA, 601 bp, Artificial Sequence
  SNP
  misc_feature (72)..(72): n is a, c, g, or t
  misc_feature (87)..(87): n is a, c, g, or t
  misc_feature (545)..(545): n is a, c, g, or t
gggccattttccagctgacaagatcttgacgtgataaaggactgcagaaattaatataggagagaagggagntcacaattgtagccnacgccatacaaagttaaaagcacatctcaaacagagggtagtgcaactgtgcactgagaaaaatgagatgaaatattaagtctatttttctatataaaaaaaggagaattgcaaaaattttgaacaacaaatgcacaactgcagaggttaaaaaaatgtagccacaaattagatatccaaattcagacaaaacatacctttcaggggagaagtraaatgggctatcatctccatcaccaaacaactgtatatcacgtcttgaaagcctgctttcaataagtccagcttctgccaagcctgaaaatcaatatttgatattatttagacagaatatgagtatagcaacaagttgtattgttaaaaattattatgatgtcctgtactgaccttgaatggaagaaaaatcagggtcctcgggagtgacatcatcaaatgcaagctcagtagcattgtctatntacatggcaggatacacttttgaaactgtgctcctaacaagttaccagaaaggcac

SEQ ID NO: 534 - DNA, 601 bp, Artificial Sequence
  SNP
  misc_feature (165)..(165): n is a, c, g, or t
  misc_feature (429)..(429): n is a, c, g, or t
acacctcataccaagcattagacatggttgtttcctgtgaagagtgccaataacagcatacaataaagcatggaagtagtgggaacaaattaatcagcattcttcaatatagaaagtaacttccacgtcaaattcagaaacatgtatggactttaaatagaaaanctgattacctctttgtcatcctcttgattcacccaagtaaattgtactttatactgtaaatggcttcctgcaccataaacacaagcaataatatttgatacttgtcttgcagatagcatacatcatatacaaatgractaacacaagctttaccattcttaactaatcccagaacaacaggcaagtaatcctcaagagcctgcagaaggtcagccagtgttgaacctcctgcagaagaaatcaaacgatgccgatgcatcaatnaattagagtaacttattcatcataaaatcatgttgttgttggtaaaactaaccatgctgagtttttctttttgttcttgtaattgtaggaccttcttgaccagccattacaactatacgcgttctaagagcagacaggcgttccactatattcttggacaaataatcaccaa

SEQ ID NO: 535 - DNA, 529 bp, Artificial Sequence
  SNP
agaggaggtaccgaggccaccccctccggtcatttcccgggaacccgaaccagatctgggtggtggagatccacgttctaaagttgaagacgatctagatatcggtgaagacctgttaaagatatcacagcgtcggaatattgawgaaattgacgaggacatccggagcagaggaagcaatggacctccccataatacttctgaagtagattcagttttgggttcagatcgccgggccccaacaattcgatctgaagcaaggcactcaagtgagggaagaagtgaaagctgggaaatcgggtctgaggtccttgccaattcaactgtaactgaaagcagaagctatgttgtatcaaaggaggtgcgccaaaaacttgggggttctttctgagatgtggggtttcttagatattaaaaatggaaaaggaaatggtgtttgatcagattataggaatgggaattgaattgattgaggcattaagtacaaaacttatttgatctttttttgtggtaaggttagctcttttgg

SEQ ID NO: 536 - DNA, 1405 bp, Artificial Sequence
  SNP
  misc_feature (243)..(243): n is a, c, g, or t
  misc_feature (258)..(258): n is a, c, g, or t
  misc_feature (274)..(274): n is a, c, g, or t
  misc_feature (335)..(335): n is a, c, g, or t
  misc_feature (1138)..(1138): n is a, c, g, or t
taaaatttgttagtttgtggtgttgcaaggatcccccctacatagggtgattggttgctgagacatcacaaggattaccctaaaccaaacagttttttctagtgggtcttggactctgacactgtggctttagacaattaaaataaatgtgttttagattgttcgttttccattataattgatcttagtctttataccttaaaaaagatggcctatgaaagtctcctattgttttaaataaanaaaaaataggcatantacaattattagtttnaaaatatactacagactaagaaaattttccaccaaaaattggggaccataacacattttancaagagaaaaaaaatatataattaaattgacttaaacagcggttaagagacaggattcagaggaaagatgaaccaactgaaagcatacctcatgcatgtgccacagcgaagcatgccagagagccctatgagcccatctagcccaaaattccatacccacctgaaaatcagacatacccagttgaatacttgaatctatcactcaaaattcacaaacaactcacccaattctgaactcaaaaaccattcaaaacccgtttggaatcataattagtttaaaggataactcacagcagctcccactgatagagcaaatgtgccaaacatttcagaccaggcatttctccaccctacaccaaccaaacccatttcattataaaattatcttcatatgcaaatcatcatcaatcaatcatgcatgacaccaatgtcaggacataaaaaataaggttttaaaaaacgatccgcaaaataaaagtcaagtctttgtggtgtctgtcattccaattgtggccgcatcaccagcgtttgtttataattttctatgatatccaagatcacaactgtggtcgtatcagcagcatttgtttataaccgcgacaaaaccacgaccagagccgttttttaaaaaacttgcataaaaataagaagaaaaaagaaagaatcaattttaaggcaccacctacctccatttgccacgagaatctgcaataaacagcgaacactgccatggatgtgatgccgaagctagacatgacagcagcaacraggtaagtgaacctctcagactcttttctggccantttctcagccaactttggtgacagaacttgttgagcgggaggaggaggaggaggaggaggttgttcttgtggctcaatttccatgtgggtgccttgttttgggtcctgcatgaggacacaaacggtgaaagttgaaactttttgggttcttggtgatgctgtgtggtggaaaattctcatgagagggaaagggagtgttgttgggattgatttggggatcttcaatggaggttggtggaaacggaggagggacttcatggttatggc

SEQ ID NO: 537 - DNA, 1001 bp, Artificial Sequence
  SNP
  misc_feature (924)..(924): n is a, c, g, or t
  misc_feature (991)..(991): n is a, c, g, or t
  misc_feature (996)..(996): n is a, c, g, or t
aaatttatagtgcagccaaggcatccgaaaggtccccttaaaaaccggttcataagggggtggtctacctagctatataagcacttatcatgttcatgaattacccgatgtgggactattcttaacacgccccctcgagccagggctcgtcaccacaaagcgagggctggcggcacccactggacagaagtagaagatggctctgatgccatattaatgaaacgaagcagcgtgaagaaaagatacgtaatcagtgaacgtaaaatgatcagcctcagcttgcttgtttattcattaatagtggaatttatatacatctgcagcatgaagttgttataaccgactaactaatctaaccaactctttaactactaactgaaaagttgttatagctgcagttatactgttaacagaaatactttactaaaacttcctcaggcctcatgattgtcttttaggagtggaagatacggggaaaaaatgacatggctatttactgcrttagtacatcatgaacagccgggtaaaatttaatggtgtttcgtttcaggtttaagaattaattttaggtctaaaattaattttagatgaatttttatatatttgatttcatttaaagaaaaatttaaaattaattttgatcgaatgagttgaaataacttttacattggataaaaaaagttatactaaattttaattataattatttgtaaaaaaatatttaattgaataattatggttttattattatgaatgttaaacaggcattgatctggtcttgttaatttataatgatttgaaattaattttgacatatttaaaaatattttaaaagttagacctgaaaattgactcagattatatttttagtcatcttaatcaaatcaaatatcatattcatttataatatatatttttaataantatatattaataataaaattctaacttaatactttgtgtgatgatattgcatttatattatcattgntgttnttgtt

SEQ ID NO: 538 - DNA, 1001 bp, Artificial Sequence
  SNP
  misc_feature (409)..(409): n is a, c, g, or t
tgttatcggctctgtagcggaagttctcataggtagtctgcaaaacaagttataatcaaccaggtgatgaagatattcttgaaacacaagggctcttaagaatcaaagtttcagaatatggttttctataaaatttagccttttcttgcatactatggaaagcaactaaaagggatgcctttcttctcgcatcttggtacaagcgaatcaggcttacactattaatgcagtttggattgagggaagaacacacagaattaccgaccttgtgagatttaaaattactatttgtttggatgaaaggaaaagtatgagggacaaaaatgagtttaagattctaaagttatcttctcaaaatttctttcctttccattgcctgatttttggctaccttcaagtacaaccattnagtattttttaatgtccagttttacttcatcattttgtccacatccacccaacatgaagtcataaactaaatttcctataaataaggaaccwggtgaatttagaaaattaaaatattttttagagagtggttccaatttaatttcaccgaggataattctactaatgctttttattcacgtaaccagttagtcttcaggtacaatgaacaatgagataaaccagatattatattcagaaatgtaaaagatatcaactgacctgatttgtgccaataaggtacaaatgaaagccagttagtccaccgacaaaccacaaagagatgaaacaatatgccattaatataacagatgcaggggattctttcattgccttccaaactgtccccttataatgatccatcagaaccttgatgtaaaaagctgagatggaaaacacatagatacatagaatagttgccgaagaaacaaacagaaagaagtaacggtagttcctctgcaaattggaaaagccataaacaaataaataaattacaagaaacacgtgagcaagccaggaacatcaatcgaacaaagcagttatcataacatcaa

SEQ ID NO: 539 - DNA, 1001 bp, Artificial Sequence
  SNP
  misc_feature (475)..(475): n is a, c, g, or t
acatgttttccatacatacaatcaccacaatcacaattcacacatcattttattccatcctcatctcatgttttacatctaaaacaacaaataacgtgtgtatatatcattattgcattatctcaaacttgtttaacccgatttattttatctttttccaaacatgccaacttgttgaataaaacatgcacaatcattgacatgtattaagtattcattattaagaattcatccttcttttcatcctgccacctagtgcaggagaacatcattcttgaatcttatatagcatgcatataacacttcatttttttcattttgtttaaactaagaaattttcattttccaaaatcatattatcactaggaagatttcaataaactgaacatggtcattactctttagtcacatactcacataccaaaattggctataaaatagtgctacaactacacctacaccaccatggttcatnattaagccattcattacacaatagcmttttctacactagtgaaaacattttgtgtgttttatctaaatcatttttacttcaaccagtgacagaagaagcccccacctccacaactacaactgtaaccgccgtcactgaaaacccaccaggaggtggggaaaggaggagaaagtacagaggagtgaggcagaggccatggggaaaatgggcagcagaaatccgtgatccacacaaagcagcaagagtttggctaggcacatttgacacagaagaagcagcagcaagagcctatgatgaagctgcattgaggttcagaggcaacagagcaaagcttaacttccctgaaaatgtaagagcagttccacccattcaaccttttcaagccaccactaggctaaccgtttctgattccaccacctctcaattccggccactctccgcggtggcgccacccttcattcagcagccacagattcagggctcctctgacttgatcagagactacttgcaatactctcagcttcta

SEQ ID NO: 540 - DNA, 1001 bp, Artificial Sequence
  SNP
  misc_feature (786)..(786): n is a, c, g, or t
ttgtgttattgtcatattctctggaattcatgttgggattgcttgtattctgtaggtcatgctgaagctgtactaagtgttgccttcagtcctgatgggcaacaactggcaagtggttctggtgataccactgttcgattttgggacttgaccactcagacaccattgtacacttgcacaggtttgacatttaaagataataagttactctgttatctgctaattaaatcaagaaaaactcaattgatgttttgttatccttctcttagtataagaataaaaatgatcaatttaactcatgcaaaacaaagtcagaattgttggaagttggtaatgctcatgtttgtgttgctagaaaaaaaaattctcaaagttagaattgttggaagttggtaatgctcatgtttgcgttgctagaaaaaaaataattctcgatagtttgtgtaatctgttaatacccagtactatgctacaagggaggggatgagaatcaacatgtgrgtaaggagaaaaaatgggaaataaagggaatgttcatgctattaaatcttgggcataatcaaatgctgagatggcaaggaatagtgggaggtgggataagagggatatatagggaaggtgaaggcaggaaattatagcataagaattttagagtcatatatagcattatagctgtttacattttatgcaggtcacaagaactgggtcctttgtattgcatggtcaccagatggaaagtatcttgtaagtgggagcaagactggagaacttatttgttgggacccncaaactggaaagtcattaggcaatccactaattgtaagatcttcaaccttgaataccaatttctattaaaaagcttgttttgttttttcctcttaattttacatatcatgccaaacttccaagttcaaacattcaaagattcgaacaaagatttatagaaacttgaagctctgaacactgaatagtcaaatgtggttatgaagattgaaagcagt

SEQ ID NO: 541 - DNA, 1001 bp, Artificial Sequence
  SNP
  misc_feature (584)..(584): n is a, c, g, or t
  misc_feature (908)..(908): n is a, c, g, or t
tattaaaatttataaaattatgtgccacggtaaactgaagaatatgtaactttgtgtgcacaaaaaaaaattagaaaaaaaaggaagttgaattattttaaaaacaaacaaagatcataatgacttaatataaaaaattatttaatatagttagttaaggttactaacttaaacaaaacaaaaacattaaatatatttaaatgttttgcattggctgaatcattagttggttttcaattatggaagggccaaagatccaacatagcatgttcataatctcccttatacgctggcagtgcattttattctcaaaatgcaacggaagtattatcatatataaccatagcttaatgccacgatgttgttaaaaagtagtttagtgcaataggccatatttatttatttattaaaaatggttatacctgatggttaattgaaatacaatgataaggattggtataatttcataagatactgatagagtgtatcttataacttacmgtcgtacaggatttgctttcacaatgagtgtttgcttgcacttttgaaggccgatggtctggtggctaggacattgagaggantgaacttctctttattatgctctttgctaaggaaaccataataatgcactgttatgagggccaaatcagtatagcatatgtgtatggtaattaaattataaaaccaaaaaaattaatccttaacaactgctcatcatttcgaactttgatgttaaggataggtcaaatttgttccttacttgggcaaataattatcattttggtcggttattctcaaatatatatatatataattattttgatctctaatgcacatcaattaatttaagttttctttatattacacatcaatcattttggtctgatagtagtcttcaaattaanttatcaaattaataatgatagtattctagatttgattaattctttagtctccctaatatatatatatatatatatattgcagtgagatgaagg

SEQ ID NO: 542 - DNA, 1001 bp, Artificial Sequence
  SNP
  misc_feature (508)..(508): n is a, c, g, or t
tggatgatgatgattctctagaaaaattcaaactaatcagttttgagctaaactcattcatcttctcaaaaaacccactttcaaaccttaacattaatcatgacttattcaagctcattagtgatgagaactcatcagtgttgttgcatcgtttgaaatcaatgagaaagaagttgggaaggaaagttaagctaatgacatatttgaagaaagcatcagaaatttgtgttgcagtgtatgacttagtggctatcactgccaatgttacagcagcacatactttaagcacactaatcatggggccaacaattctcaactttccatgcaagagtcttaataagagagagcttccacacttgaggttttcaagaagaaggtttcttagtaatgtttgtgatcagcttgatatagcagccaagggaacttatatattgaataaagactttgatacaatgactagagttgtggctcggctttatgatgaaattgaacataaaaggrcaatggngcaattctttttggacaagaaggatgataaattctctttgcaaatggtgaaggagcttaagaaaagtggtgatgggtttaggaaacaagtggaagaacttaaagagcatgtgtacttgtgccttgtgacaattaaccgagcaagatgtttggttactgaggaaatgacaaaaatgtgtacagaaggcattgggagtgtagacatgtaaattattataaacgtatggatcttgtatagtgtggttaagatttgttttgttttatttaaattatttattacattaattagtggaggtacagagagaaaaaggtgaaagtagccatgacaataaaaattatcatgagtttcactctgttcagacttagatggtaaaaactcactttgaataagattgttgggatcaattttcttcaacattagaaaccggggtctggtacgtaagtaactacctgccccaatatatatatatagagacgactttccattaaagaga

SEQ ID NO: 543 - DNA, 1001 bp, Artificial Sequence
  SNP
  misc_feature (653)..(653): n is a, c, g, or t
atatatagtgttgaaccttgctccctgtttgttgcggaattttctgcgagtggtacaagaaacggcgttagggtttgatctggcttggtgagaggtaatcgtatatagtgtttcggtggaaaccaatggattcaccgatgggctttatctttgggccgatcaagtagcccaggacctttacttattgtaaaaaataatttgaataataaaaaaattaaaagatacccgcacataatccttttaaataaattcatataattactaaattttaatcctgacattgcctaaaaaaaaaaacctttaatcctgacaaacatttaagtttttataattcttgaatacgttgatttttttttttcattatttactcatatatggtcgtgctttcatattggttcctttaaatattatatatttagcatttaggtgggactttatattaagactttataaaacttaaaaaataagcacagttttattttacagtaaaaaaaaagaaaraagcacaactaatgccttaaaaaaaccctttgcacactcgcaaattaatgatgacgctcccagcataataaagccagaaacaatctgaagattatgctcaccatagcaacttcctcaacttcccacatccaaaattaatgaattactctatngcattcatctattaatcccgttaacaatttataaaataaaaatataagagaaatacatgtgaaaaaaataaataatctttaagatatttcaaacaaacattttttcttttcttttcaaaacctctttttaaaaaaatattaaaaatacatcttatgagagaaaatattttaataaaaaaatgattatatttgaatcgtataatcatttatgaaaaattaaaatttaatgtctaaaactcatataattttaataagtgattacatgatattaaattctaattattcatatttgattaattaatgattactttcatataacatttttttctcatatgaggtcaattatcc

SEQ ID NO: 544 - DNA, 1001 bp, Artificial Sequence
  SNP
tgagataaattcataaaatgtgataagaccagcaacctaacactagcttgatgcaaattttaatgctctgcctgcaacttttggcgaagcaaaagtgcatgtacagaaggggtctaacacaaggatgcaaacatattggtagtaactaggaacaaatagtgtatcttgcattcttcttctcatgcacaaatttgattcacagtaagtatagctgcactagtagattatagtagaaagcattgctgaagatgaaatattaagtggtcaaattttagatatcacagatccaagcacaataatgaaaaacaaacagcattacaaatatattatacaataaaatacaacaatatcatactaagtttctggaaacaagattttacagttcattacttacatacaaaactttgtaaactcatataataaagaaatatttcgcacttgtagcagccaacaatgctttcttctctgatcagaagcgtgcagcacatctgcaacaatcarcatttttttttacaaaaattaatgtggtggattacaagatatagacaaaattatatttgtttatataaaattgaaaatgaaagtatacatgcaggggccatgcccgcccaagtttttcacaaagtgtatttaaaatgccatgtaaaaagaattacggtccccttaaaatttatgaaaaaaatattgaaaataacacacgtagttaacacttagggggagaaaaggaaaaaaagagagagaagagtgtgagtataatagataatataatgtgatggtgtgatagtaaaaagtgagataaaaagaaattaaagatattagtaaagtatttgtaatgttgaagtatctatatataattatctaaaatcattttatatatgtggttattttttagtttctcatacattacctctattaacatatttaaaagttaaataactaattaatcaaaatcaataaaaataatgaagtaaactattttaattaaaaatgtcttaaaataa

SEQ ID NO: 545 - DNA, 1001 bp, Artificial Sequence
  SNP
cgcaacatggcacgccccaaacagaacagctgtctttgtcccatgctccagtttgatccctctccaacaactaggtaacaatttcgtacgaatcattactaacatgggaagaagtgcttacattatatatagttaaaatagtgaaagttgaaagtgcacctgaggagtttaagccctcttctttctcttgaaccacttcttgcaattgacacttgccaagaacctgagtttatattaagcaagaattagtccatatttgctctgaatagcaaagaaaagcagagtgtagctctagtaggtgttacctcccatatctcttgatcagaatgttgagataaagggtccaaattatatctaacagtcccattgaaaagagtaggatcctgaggtataatacataaacgtgacctcaaatcttgaaggccaatagaagaaatgtttatgccatcaacaacgatttttccgcttgctggctccatgagacgaaataaagcactgatmagagtagacttcccactgcctgtcctgccaacaataccaatcttgtgccctccttcaaatgtgcaagtgatgccatggagtacaagtggcccttcaggcctatatcttatctgttttggtatagaccacaaaattatgcatttcatttgaactcccatgctttttaatattatatatgttgcaaattttaaagtatgcaattagacaaatacctgcagatcatttatttctactttgcctgcatctggccaattcaaaggaggacgatttccttctattacttcttctgcctcacttggtatatgcatatattgatttatcctttctacagatattatgtaatttgctatattgcattgactttgaattaaaaataccaaggctgcatttagtgaaaaaccataagagagagccatgccaatgaaccctggaaaaaaggatatcgaaattaagaagcttgcatcaagaaagatattgatactttctgaggataaaatcaa

SEQ ID NO: 546 - DNA, 1001 bp, Artificial Sequence
  SNP
  misc_feature (268)..(268): n is a, c, g, or t
  misc_feature (651)..(651): n is a, c, g, or t
attgaggttgaagcaattgatggtggttgacttgtgatctccgtagatatgagctaatacctctccttacccctcattaggcttttaatcagatgtggacattaattccttttcagtctgctgggcctatcatgcgttgatttggtcctctgttttcttaatactgtactcattgtttccttacagtttgaaatttggatacttagccctttttattatcagtttctataataaaatgcagtaagttaatttcagtgtctggtggtgnattgtaagacatgtaaataatgatagagatatggcccaagtagtgcttatgaggcttggatagttctcaccttacaagctggtcttgtacagttgagttttaatccaaattctaagatacatgtatgatgttcaagaattggagactagaacaaaatttgaaattcagtcaaagcatcaatctcccatcttaggttctacatgtcatcagtaaacctgataggctaatagctwtggccagaagctttctccttgcttaacgagtagttggtagaaaactaaaaatagctaaaatatcaggcatttcataaattgagtcaatttgctatttgtctttatactatgctgtgttgaatatacctaaagcctgtagggagcctcagnagtagtgaaattatagtttatttatgctccaggtcactggtacagttcttggtgtggaaccttggataacaaaaataattttttggttaaagtatatccttttattaatttagaattagatacagctatccctggaatttgtgcttagattttggagtcaggaatacatttgttttatgtcgttcatcaactttggttagttgtgacatttagataaatagatttaatagtaaggctaattgttgtaattcacttcactgtagaactggatttaaatattcagaaattatgcagcctacatgatatgatgagttaagctgttccaaagagaaaagattgtcttcaaacaa

SEQ ID NO: 547 - DNA, 1001 bp, Artificial Sequence
  SNP
gccgtgcctgacttctcacctactcattttcgctctctagctataatgagtttatattcacaactttttaaataatttgaagctaactgtatgctacggggtttatataaaaaaaaaaatattaaagaattgtgtttttaatctttaaacttttgggtaatatggtcaaattcaaatcactgtacttttatattgatgaatttggttataaactttgaaaaaaaaatctgaatttagtctctccgctcaactttaaaaaaataatataatgatgggctcttacaaatgggagacttttaaggatcagattatttgatataaaagtatgtagatcttaattacttaccaaaagtatatataacaactaaaaacacattttttccaaaactatatgctaccaagttgcagaacattatgaaaatatgttaatattaaatatgcttttaataatcactgtataattaattttaaatttctaatgttagtccttataaaaaaaawttggtcatttttatagtctcatttatttttcaccattaatattagttcctttaaacaaggacaattttcttcttcttttttctcattttcagtccctttctcggactcatattgataatggaaaataaacgagaggcaaaatatggacaaaaaattaataggaattaaaataaaaaaaatctgaaattttacaatgatatatttaatccaatagttaattaatcatcatgcacatatatttacttgatatattttaatttgagtcaactatatgctaccataaatttgactaaaatgagtggcaagaaatttttcattctcttctaaatacaagtgaaaatcaaacattttttttaaaataaaagactgaataagttttaatattgtatgcatgtacatgattgtgactgcaacgttactaaaaactattccaataatgtgtcacctgccacaatggcaacttgcaaggtagcaaaaacgaaaataattaatggagatga

SEQ ID NO: 548 - DNA, 1001 bp, Artificial Sequence
  SNP
cattccgagaatttatttcaatgaatatttcatacaataatctccatggtataattcctaattttccaacaaagaatattcaatattccctaattcttggaccaaatcaatttgatggccctgttccaccatttctgcgaggttccgtatttcttgatttatccaaaaatcaattctcagattctctttcatttttatgtgctaatggtacagttgaaactttgtacgaattagacctttcaaataatcatttctctggaaaaattccggactgttggagccatttcaagtcattaacttatttggacttaagtcacaataatttttcaggaaggatacccacatccatgggatctcttcttcatcttcaagcattgctattgagaaacaacaacttaacagatgagatacctttctccttgaggagttgcacaaatctagtaatgttagatattgcagaaaacagattatcagggcttatccctgcttggattgggagcraattacaagagttgcaatttttaattttgggaagaaataatttccatggaagtttaccattgcaaatttgctacctaagtgacattcaactcttggatgtctcactaaacaacatgtctgggcaaattcctaaatgcataaaaaattttacttcaatgactcaaaagacatcttcaagagattatcaaggtcattcatatcttgtctataccattggcatttctggtaattatacatatgatttgaatgcactcttgatgtggaaaggttcagaacaaatgttcaaaaataatgtgttactacttttaaaaagcattgatctctcaagcaatcacttttctggagaaattccactggaaatagaggatttatttggattggtttcattgaatttatcaagaaaccatttgaccggaaagattccttcaaatattggaaagttaacattacttgactttcttgatttgtcaagaaaccatctagttggttcaattcctttg

SEQ ID NO: 549 - DNA, 1001 bp, Artificial Sequence
  SNP
tgccttgtccaagactacggaacgatctaagaaagtaagaagaattattatgatcacatattttatactcttcaaactgtgaaaccaacaatgtgaaatacaaatctccaactatgctacaaaaccacacagttcgactgacattgaatatgatcccttaagtagtataaagcatttttttttaaaagataaatttaatatcatgaaaaagataaagacaaaaaatgatgtataattatatatatatatatatatattatatatatatattaaatctcctttttatacaccagaatgtaagtattggctgattttattttcatttcatttatttacgcaaaaaaaaaaaaaaaagagtttgggggccgtggtcaacagtaacacaagaacaagtatgagccccattcagttgagaatagtgattcagtacatactgttacagaaaattctggttattgaatcttcaaaattgtacaaactgtaaacaagaggcagaaaacrcagtctacaagtaacaactagaatcataatgaaatgtgctaaacaaaaatatcatcatgtgcccaaaacagcacctaaattgtgtcttcatcccagttaaataatgcttaatttcttcaaccacctcaattgcaaacacctaaattcgtcgtttctttgggagtctgcaaccattatggggttttcttgtagtatcttcaatgtatacaattggacttctatcccctcgagctacattgttggggtactagctagtgctatctctttaattttccacacaacccttattttttctgttttctttctgcatgtaaaatatgaaggtcgattcaaaacttaattttattttattctttgtgtccaatattattaattagatgaagaaggcattgaacgacacatcatgttcttaccaagtgatcatagctgcaagttgctcatcgcccaatttcacaatggagaacattgctattcgctttggggatgttcatggcaaccaa

SEQ ID NO: 550 - DNA, 1001 bp, Artificial Sequence
  SNP
  misc_feature (98)..(98): n is a, c, g, or t
  misc_feature (574)..(577): n is a, c, g, or t
gccacacacttgcaataacatgtgtaaaatggggtggagatggcgtgatttatactgggtattctctccctctgtccttccagtttctgtgaagttcngcctgagtttttatttgtagtaattcttattgttatattgcatattcctgcatattcctgcatacccctgttggaaatagaaactcatttaggttaaattctcattttatgattttaactcgtgtttttatccaagagatcttattttcagtcctttaactcaactgatcctaatgttgattgatgatatgaacaggggttttcccctctttttaattaaattagtgtcttaattatcactctgcaattctttttactgcttggagcttaattatgttgttttatacagctcacaggattgtacaatcaaagtctgggaaaccacacaagggaagctaatccgagaactgaaggtgagcgtcatccctttgcagtttaacttcttatctgcattttttttaawcatggtttttgttatgcataactcctgtttctcatctggtgtcaactttttcttcatttgagttatttgatannnnctttagtgtcacttttatgcataccagatatagctactaattggtattttactatttatggtgaagcaagaattttttgctgtcacatttgcttcctaggaaagtgaaaaattgcttttgaaagcgtgcaacagggttcctaacggttttctgaacatacatttagtgttttattttgattcattattcattgttagtgtaaaatttttattcaatgtgtggatacatcttttaaaagtttgattctccaggtatggtgaccaaacttctgtttatccattgttagaatgttagtgtaaaatttttattcaatgtgtggatacatcttttaaaagtttgattctccaggtatggtgaccaaacttctgtttatccatgttgcatgagacttttttcttttaattttatttcaattaatgttttt

SEQ ID NO: 551 - DNA, 1001 bp, Artificial Sequence
  SNP
  misc_feature (871)..(871): n is a, c, g, or t
ttggtctttggtgtgagtttttgttgcgataccttagcttcgatgaaagtgaagaggatgatatgcgggagggggtggttcgtaaatgttacagatgaagttaatccataaaaacgatatgaatcaacttgatttgtatgttgacattatacttatacggatcaaattgatttgtgtaagccttccagatcaagttgatccataatatttatacggatcaacttgcttgcatagcccaaaatgtctagtatctataatagataataaatgattgtattagtatttaataataaaaagttgtcacaagaaaataagaaaagggaggagtgatctgatactagtaaattagcatgcggttattaaatattatcaagatattaaaaattatagtattatatataaatatctatattctcatcaagaaaaagaaaaataattataagtaatgagagaaaaataaaaaacaaaattcagaaatagtaaaaaaatagttgatttgarcattattttactggcaatttccaagcaagagtatcttcattatatttcttaggctgggtaagatatggagatgagaagcaaggaagagatagaaataggaagagacataacaccaacactcactcctctctcttcattatatttccaagcaagagtatcttcattatatttccagttgtaaagaattcattaaccgctgcaaagatatcgtcaccaatgatattccaagtcttcttgaagaataaaacattgaaaccatctggcccaggagctttattgttatccatcacagaaataacgttccaaacctcttgcttagaagtaggacaaagtaaggtcgcaaagcaatcgatggaaaccttaggacccntgttgcagatcgaaatggaaggaatttgggtcagctcatgagcactaaacaaattcctaaagtgattcacaaaagcaaggacaatttcatcttgggaggaagtgttatgcccatcctctagccttatggc

SEQ ID NO: 552 - DNA, 1001 bp, Artificial Sequence
  SNP
atgatatggaccctaaaacacctgtcctaggcccaggatccaacaaactacaaatactttgacccaaggggaaagaaaaaattgactcaaaaagagggttaacaagaaaaaaaaaaaacttgaaataccttcaactcgaagaacacaaccactgaaaaaagagaaagtgagaaaagggtcgaacaactggtgaagtcattgatggctacagaggaagagagtgcggtgaaggagcctttggatctcattaggctcagcctcgacgagcgtatctatgtcaaactccgttccgacagagagcttcgtggcaaacttcacgtaattcttcaatcttttttttttctccttttcatgaatttgtctgtttctttaagctttttttttactctttttgagacttccctttaacgcgtagggtgttttgggtgttctgtgatggaaaatttaaaattttaaagttgttttcaaggtaattgaaatctgggtttgttgcaatagttsgcaagtttgtgcctttcggacttccctaatgatatgccctatgtaagaataatggggtgtatactacttgcgtgtggggatggaattgagtctttggtggttccaaattttgcgctttggaagaaagttgttttttgttgctgaatggaaatttgagtgttttgaactataatttagaataagcaggtttgggatgaggaatgataagtatgagttgtttattttttttgcaaaatataagtacaacttgttagttatttttcttcactgctattaactgatgttaaactagatcaatgatttggtgcattttgcgtgggtggggtggtggtttttatgtatgtgtttgtttactgttcttgcatttttataagattttcatgagcttgtaaattgtaatttaatttaccgaagagttcctatctgaaactaacctgagttcacaatgatttttacaagttacacatcactgtcattgatcttgttcatttgatagaagt

SEQ ID NO: 553 - DNA, 1001 bp, Artificial Sequence
  SNP
  misc_feature (493)..(493): n is a, c, g, or t
aaaagatgaaatggagacaaatcttgtcaatcttcgaaagacaaaatactcagcaattatgtctagtgttgatttagaggaagctggtcataagcttctggaaattaagctagagcctggccaagagatggaattgtgcattatgattttggaatgttgcagacaagagaaaaacctatctctgatattagagtcttctcgagcagtgtttgcagatgtggcaaagttatgattttggaatgttgcacgatcaacaaagtacaccaagaaaatctcgaaaagtgctttttgcagcagtactcaatgattaaccgacttgaaacaaataaactgcataacgtggcaaagtttttcgcttgtttatttggcacagatgctctaccttggcatgttttgtcatatatacgcttgactgaagatgatacaacttcttcacgtatatttcttaagactattttccaggaaatatcagaacatcttggaatcgggctgntaaatgarcggttaaatgatccaacaatgtaagaatcttttgatgaatccatatttccaaaagataatccaaaaaacacacggttctgcattaacttctttacattcattggtcttggtggtcttactgagaacctacgttagtatttgaagaatatgccgtgtcttatcaagcaacaacagaaagatgagtcaggtagttctgattcatcagattcagatgcagaatcagcaagttcggatcaaagtgacactgagaatgacagaagcggaagaaagcggccggaggacaaagggtgaagcaatttgatgctattgtcgaaggcccttgcatccacaaaactgattgagtatccaaggtttcttaatctttaaatatcactgaacttacttgccttgttatgcaaatatgaaagggatttttttttttatcagtaatgtgaaagggatatgtgggctatgctggttgagatgttgagcatgctcgatggatttgtttaattttgttc

SEQ ID NO: 554 - DNA, 1001 bp, Artificial Sequence
  SNP
  misc_feature (345)..(345): n is a, c, g, or t
  misc_feature (506)..(506): n is a, c, g, or t
  misc_feature (637)..(637): n is a, c, g, or t
gaattatggcccattacgcgtaaagttgccaattcgatctctctttataaaagtatttaggagtaggaaaaggtgtccatttttcttctcgaaattcaagagtaaacaaactacggttgaaagaaacgtctacataattgaaaaaaaatgaaatcttattttatgtgtgtgtgagttctgcccaacattgacaacacgggagtatatccctgctgctaataatttataataaaaaaatatttaattttaaatgattaaaaattttaatataaaaaattgaaacgtttataaattaatgtgaacttagacctccaaatggattcttacactgtaactgatgtcacntaggtagtagaattccaagatccaaaggcactaggtgtgtatattcaattatacttaatttattgtaattttgtatcgttctgtatggcttgacagctttggatgttcttcaagtctaagtatcatatttatataagctgagacagagatatcagrttttnatttgtacagtctaagtagtatagtgttgtgcgagtgacttgtgactaaacgataatattttatatgcgtggagagatcgagaacgagctaatattgtagtcttttcttaatttcaactttcttttttatnttatttccctcacaatatatatgggaatgctatacatgcttagattttgagaaacctaattagaggatcaatgcaatgcaaatgcagaaataaactttcttccttgttattttttctttctttctgaaacagccaaaagaatatcattgaaatagcaccagaggtgcaacaacacaaattacaggattagagaaagacataaaacaacatttaacagagttagccctagctcccaaggcataacacacttgccaaataatagatggctcgaaccccctagaagaaacaacatccggcaaatacaataacctaggtaacacttaaactgaaataatcgcaggaatagaaacagaacccagcgtga

SEQ ID NO: 555 - DNA, 1001 bp, Artificial Sequence
  SNP
ttataattccatgtttcacacttatttgagctttgatatacagaaggatataattccctagccataggagacattggactgtagtgaaataattgtatctagtaaaattgggtcgtgtttgatttatttagtttttagcctaagtgggtatatatagcagcagccttcacaacaattaattaatgatcaagtttttaaatatatacccagaaaaaattactgggtttcccccaatgaattagtcaatagtcaataatgattttgatggatttcagtctcgtaagcattccaagcacccgggggctattagacaaaatgtctattaataactagaaaattcaactaactaaattagtgaaatttgaattcgggtatattgcagttcttatactagataaccttgatatcgagcatttccttcctcttttttatttttattttatacatatttatttaaaaacaaaactgcatttgctaaaagaaagtctgggtattgaattrttaggactggactatgaaagtaaaagccttaattcaattttgaaatagaacaaatcaaaaccttctccgaaatctcctaattatgtactaattaactagtttaattttctctgacttacacatatattaaattcatttttataatttataagaataattttttatattatttgaattaatatattattaatgatttaatttaagttttaataaatatatattaatagatatatcaataaatatttaaatatgtttttatacacaaacatatttcagaaaattgttattattataagtattgtcctatatagaatttattttactttaatgatatattacatattttcttttgactttcttttaaaaaattaattttattctttttttacacatttgatttgagataaaaaaaattgggtgaagtcattaattacaaaagaataatttaatctagatttaaattattttattggatgatcaattaaatttatgcacgtata

SEQ ID NO: 556 - DNA, 1001 bp, Artificial Sequence
  SNP
  misc_feature (440)..(440): n is a, c, g, or t
  misc_feature (560)..(560): n is a, c, g, or t
  misc_feature (583)..(583): n is a, c, g, or t
  misc_feature (679)..(679): n is a, c, g, or t
attttattttttagtggacattctttaacttgtgcttctattgctctcaataacttaaagaatcaatcattttaaaatttggttacgaaggacgagctttttagtgtgatttttagtatcttaaatacattccatattgtggtataaattcaaggatctttatatattttgaactttgtataggttaaaatgtacatattaaattatctttcaaaaaaataatagacttagaaagaaaaaacttgatcaacagatactagaaataacttggaaacttttttaggtatcatcatgttcataaatttatcatgttcataaatttataactgttgagttttttaactctcttcttatatggaataaatgctcaaatgaaaaggtttgtatatctcacttattttaatgaagagagatcagattaaagagagtgagatacactnagaggaactcatttgagaggaaaaaaatagttacaaatcattaagagagaaagaagaacargaaaaatcattgtgatttttgcatacctatcaaaaagtgtttttaagattgcaactgtngatttgttcactgttggatcggnctgatttttggccaggagactctacacacgtgatatttcaagttgttcggttggatcatgaaaaagatacctggagagagagagataagtgtttcntattatctgttctatattttggagttttatcttcttgtctctattgtaccaattgaaagtttattttgatttgactgcttgtagcatgttttagtatacttgttggatgttttcttgtatcttcattgattatagtggagttatttttttggtctagacgacctatagtttttatccttgcattgaggggttttccacgttacacaaaatgtgtctgatttctttcatttttatttcgcgctctatactttattggtgatcctcacaaattcttgtaagtttaacggaatttatttccactgtctattactcacttatagaa

SEQ ID NO: 557 - DNA, 1002 bp, Artificial Sequence
  SNP
  misc_feature (488)..(488): n is a, c, g, or t
  misc_feature (945)..(945): n is a, c, g, or t
ctttatttcttttcaaattttattttcatttatatgcaaacatgaaatattgtgttagtaagatgtctagagagataaatataccaattgagagagtggggggggaataagattgttgattacattgggcaagaaaatctacaacttagccttaggccaaaattttaaatgtgaaaccaatgatctagccttaactaatagggttgtgaaggttcattgggcttgtggacttttttaatgttaggcttttgactttgggaacaattattcctattaccaaatttgctattggccctactaacttttttgaaattcttcttttgcccactcaccaaatccatacacccattcctttctcctcagattcaaaattgtctcccccaccctagcatcccagatccataacccccatgttgctctctccctcgtgaaacccctcccctcgtgccacccctctccctcatattccattgctttatttttttcanccccatgtgtgcawcggaaatacaattatgttatagacttgttcaacaaaatcgtatttcctttggaaggatatttttggaaaaaatatttaaaagttcatgtgggtagtgccaataaaaaaagttgatagtcacaatagcatgcccctttgactttataggccttttacttgaacccatgtggaatatgagtgagcaagtggggtggagtgactcattttaatagctctattcatatcaataaggctaaaactttatgcacctccaaaaatttcttctaacaccccattacattctagaatatgatgggtgtgcaagaagcaacaatctatcaacaaatgtgtgcaaattcacacgaattgcaacttgcaaagagtgtcgaatacattcatacactgaatcaaataaatataaactagagaaaatagggaccgtaagatccaatgatttgctcgtngatgagtattgcacgttatatcttcacacttcgttttttttatccatataaagctca

SEQ ID NO: 558 - DNA, 1001 bp, Artificial Sequence
  SNP
attttgtgtgatcgctccaccatcccaaacataccaataataaacagcaaattcattgtcctaatgcataaaatgaacacagttatatttaaattgatttagtaaaaaagctgcaagatacactgaacctgagaagttaatctaaaaaacaagttcagtcaccacctgtgaagtttgaaatttacagctggaagatcctattagatactgttctaatactttgggatgcaatagccatccatgtatgaatatggaattggataaaaaatcaaaagctctgcatgatatcgggccaattttaactagccacaaattaaaatgaagtgttgcaaacaatgtagcccaatcacaaaaccgataggaggtaaaaaaacggaaatagaatgaacagtattagagtaacttgctacctcttcatcatgtgtattgttatagaaagattttaataggatatgtagaattctgtccaaatgaaaagaaaaaaaaaaaaacaggtcctargagtatctccaatctccaatagaaaagtcattcatgcattctttaacttacttttaaagaatactatacagccatataagatttaagaatttcaacaaattttaattcaatagtagaattcttaaaagcttcaaactagcttcacaacgtaccttacatttatatgttttgtgttaattctgacaatcaaaataattgtttatatgttcttggtagtcacattattacaaatcttaatagaactgctcagatgttgtaatttaatttttcatgcagcaagtggacggaaaaaattcttaattgttgaaaagaaaagactgattcagtaatgagggttacaataagaactcggtgtcataatgttaactaagaatggttcgactatattaacgaattggtatattacagaaacacaagtttaaaagttatggtcttgagaacgcaacaaaagacagaaagacttgattattttccaagaagggatgccactatattaactt

SEQ ID NO: 559 - DNA, 1001 bp, Artificial Sequence
  SNP
ttaaagtatctttgcaaaaacaatttcacatgaggcaaccttaatttgcaattgaaagttctttattgcaatatcaactcttggctttggatgtgttttcaccttgtactccttctggcgtatattttatgtctctttagatcttaataaaggtatttttgtcaaaatgatcattttgtcaccgtaccttatgtcattaatatttttcttaagatgcgtatattaccttaattaagacaaatagagctatgccattttttatgaaagtaacatatatacaaaaatatgaaaaactctttttcacacaaaaaatgatagtttttttttggtttttttattattaaagtagtttccatgcagattaatgatagtttctgattaaggggatcgtttctgtttgatttatgcaggtataattaatacgctgggtagatttgtgtttaaaaatgtccaacaggtaagttaaacaactatgatatttgaagccaaataacacgagtwctcgtaaactatttaagttagattattcattaaattaaatgtttggtaactagaacaaatatgatatttgaacagagatatcaatacaaatgacatgagttattcgtaaacaatttaagtttgattattcattaaatgcatgcttgtccaagattgttcgtttagttggacaaacaaacttaaacttatagttcaactcatatcattgacaaaatagcaattaatattgttttggacttttaaaatgacaaatacatgtaatttttcttcttctaaaaaaccaataatgttaatgcattttttgctttatttatttaaaaaacgcataatttttttaaacatcttttaattaaaaaagcactttcctgaaaatagtttaaaagtttttgaaataatttcccttcatatgttattgacttgatctttccatatttgctttcttccccatccttactgtagggagctgcaacaacatgctatgtagcattgcatccacaagt

SEQ ID NO: 560 - DNA, 1001 bp, Artificial Sequence
  SNP
  misc_feature (116)..(116): n is a, c, g, or t
  misc_feature (337)..(337): n is a, c, g, or t
  misc_feature (398)..(398): n is a, c, g, or t
  misc_feature (504)..(504): n is a, c, g, or t
  misc_feature (509)..(509): n is a, c, g, or t
tagaaatttctttatctttattcatagggtagaaatattggtagtagaacccaactgtgatttcaaccgcaacctcgtcataaaatccaacaaatgtgatctcctctgccaccatngcggcaaaatccaatgagccccaactcctggcaaacctcatcatgaaaccccacatgaaatccaactgcgaatccagtcgtgtgaaacctactgaagtccaccaaacagtttttcttttcttcatgttgtggtttgattttttgttgttaagattttgatggttcatatctattcttttatccagcttgtttttatttagtccacccaccaggggaaaaantgagtggtgagatataatgaagatgaagggtgatggagacagataggagaaagaagaaagnggcaatacgacatcatttttatttttttaaaaaacttttttccatgtataatttccaatcagacaaagagtacacgtaatatcacacgtggcatgcatcatgrccnattancgatcatgtaggtagataataattttggactaacagaaaatatccgagacaaaaaattttacgacttcaaaattgtaaggtatttttattacgatttcaaagtcataagttttgtttttattttctatttttctttttacgattttgtagtcattttggttttctttttacttttaaatttttttattttcttgtattatattttttattttttaaatttttttaataattttatttatttaattattaaacaaatattttatttattcattttaaaaaattaaaattcaataaaattattaaaatattatctaaattttaaatatacaaaatatattaaataaaaaatattaaaatggaaaactttgatagtattagttttatttaatttattgtatattttttatgggtttatttaatatgttatatattttttaatgtttttttatttaaaatatattatgttttctaatattgttttatttaattatt

SEQ ID NO: 561 - DNA, 1001 bp, Artificial Sequence
  SNP
  misc_feature (219)..(219): n is a, c, g, or t
  misc_feature (440)..(440): n is a, c, g, or t
  misc_feature (604)..(604): n is a, c, g, or t
  misc_feature (607)..(607): n is a, c, g, or t
  misc_feature (612)..(612): n is a, c, g, or t
cttaattttcttatttttatttctttccttaattcatttagccttatgcatattgttatttatattgaattagctaatcttaattaattccaaatattcagtgtagaaatttctttatctttattcatagggtagaaatattggtagtagaacccaactgtgatttcaaccgcaacctcgtcataaaatccaacaaatgtgatctcctctgccaccatngcggcaaaatccaatgagccccaactcctggcaaacctcatcatgaaaccccacatgaaatccaactgcgaatccagtcgtgtgaaacctactgaagtccaccaaacagtttttcttttcttcatgttgtggtttgattttttgttgttaagattttgatggttcatatctattcttttatccagcttgtttttatttagtccacccaccaggggaaaaantgagtggtgagatataatgaagatgaagggtgatggagacagataggagaaagaagaaagrggcaatacgacatcatttttatttttttaaaaaacttttttccatgtataatttccaatcagacaaagagtacacgtaatatcacacgtggcatgcatcatgnccnattancgatcatgtaggtagataataattttggactaacagaaaatatccgagacaaaaaattttacgacttcaaaattgtaaggtatttttattacgatttcaaagtcataagttttgtttttattttctatttttctttttacgattttgtagtcattttggttttctttttacttttaaatttttttattttcttgtattatattttttattttttaaatttttttaataattttatttatttaattattaaacaaatattttatttattcattttaaaaaattaaaattcaataaaattattaaaatattatctaaattttaaatatacaaaatatattaaataaaaaatattaaaatggaaaactttgatagtattagttttatttaat

SEQ ID NO: 562 - DNA, 1001 bp, Artificial Sequence
  SNP
  misc_feature (345)..(345): n is a, c, g, or t
  misc_feature (884)..(884): n is a, c, g, or t
atggcattggctcttactccaacagttgtctttggctcaatagcctttgcagttttctgggttctagcagttttcccatgtgtgccttttctacccattgggagaactgcagggtccctactaggtgcaatgtttatggtcatattcaaagttcttaatccagatcaagcttttgctgcaattgatctcccaattcttggtcttctttttgggacaatggttgttactgtttttcttgaaagagcagacatgttcaagtacttggggaaattgctctcttggaaaagccaaggaccaaaggacttactctgtagaatttgtttaatttcwgctatatcaagtgcntttttcaccaatgacacatcttgtgttgtattgactgaatttgtgttgaaaatagcaaggcaacataacctcccaccttaccctttccttcttgcactagcttcaagtgctaatattggatcctcagcaaccccaattgggaacccccagaatctagttatagctattcaaggtaaaatatcatttgggagctttctcactggtattcttccagctatgcttgtaggagttgtggtgaatgttgtaattcttatagccatgtattggaaggtgttaactattcataaggatgaagaggatccaatttcagaagttgctgaagaggagtttgtttcccatcagttttctccagccacaatgtcacattgtgcatcctttaattctcatgaatgcaatgacagtctagaacctactaatggtcttcaaaacccttctcaagtacatcctatcagaaaccaaacaactccaagtgtaactgaagttcagatggttcttagtagcacaaaggattccacaacaaatgcatccaagatgggganaaatgatgcaaaggaggaaactaatccttcaaaagttgttgcaatagtagtagataaacctatagaagcacatgttatgcactcttcacaaggaaaggtggactatttgagaaaaaa

SEQ ID NO: 563 - DNA, 1001 bp, Artificial Sequence
  SNP
  misc_feature (68)..(68): n is a, c, g, or t
  misc_feature (70)..(70): n is a, c, g, or t
cagctgaggctgcaactcgtgctccaagcaatagaacagttggtacatttgaagccaaatttgatagnanaagtataactatagccagtatagctattccactagcatgatctattcgagaataaggctccattaagtcccaaagagcacctggaattccagttttcttgaatccatctactgtgataaacattccacaaaagaatatcaacagtgaataagagaccttgtctatgcttggccctgcatctttgaaatcaagaaccaccaaagttattgcagctgcaattgcagcccatgccatatttgcaccaagaagcattgcaatcaccattatcaacgtgattgcataaacacaagatttccacactatccttttccatttttttctcaaatagtccacctttccttgtgaagagtgcataacatgtgcttctataggtttatctactactattgcaacaacttttgaaggattagtttcctcctttgcatcatttrtccccatcttggatgcatttgttgtggaatcctttgtgctactaagaaccatctgaacttcagttacacttggagttgtttggtttctgataggatgtacttgagaagggttttgaagaccattagtaggttctagactgtcattgcattcatgagaattaaaggatgcacaatgtgacattgtggctggagaaaactgatgggaaacaaactcctcttcagcaacttctgaaattggatcctcttcatccttatgaatagttaacaccttccaatacatggctataagaattacaacattcaccacaactcctacaagcatagctggaagaataccagtgagaaagctcccaaatgatattttaccttgaatagctataactagattctgggggttcccaattggggttgctgaggatccaatattagcacttgaagctagtgcaagaaggaaagggtaaggtgggaggttatgttgccttgctattttcaacacaaat

SEQ ID NO: 564 - DNA, 1001 bp, Artificial Sequence
  SNP
  misc_feature (118)..(118): n is a, c, g, or t
  misc_feature (672)..(672): n is a, c, g, or t
ttttttctcaaatagtccacctttccttgtgaagagtgcataacatgtgcttctataggtttatctactactattgcaacaacttttgaaggattagtttcctcctttgcatcatttntccccatcttggatgcatttgttgtggaatcctttgtgctactaagaaccatctgaacttcagttacacttggagttgtttggtttctgataggatgtacttgagaagggttttgaagaccattagtaggttctagactgtcattgcattcatgagaattaaaggatgcacaatgtgacattgtggctggagaaaactgatgggaaacaaactcctcttcagcaacttctgaaattggatcctcttcatccttatgaatagttaacaccttccaatacatggctataagaattacaacattcaccacaactcctacaagcatagctggaagaataccagtgagaaagctcccaaatgatattttaccttgaatagctataactagattctgggggttcccaattggggttgctgaggatccaatattagcacttgaagctagtgcaagaaggaaagggtaaggtgggaggttatgttgccttgctattttcaacacaaattcagtcaatacaacacaagatgtgtcattggtgaaaaargcacttgatatagcngaaattaaacaaattctacagagtaagtcctttggtccttggcttttccaagagagcaatttccccaagtacttgaacatgtctgctctttcaagaaaaacagtaacaaccattgtcccaaaaagaagaccaagaattgggagatcaattgcagcaaaagcttgatctggattaagaactttgaatatgaccataaacattgcacctagtagggaccctgcagttctcccaatgggtagaaaaggcacacatgggaaaactgctagaacccagaaaactgcaaaggctattgagccaaagacaactgttggagtaagagccaatgccat

SEQ ID NO: 565 - DNA, 1001 bp, Artificial Sequence
  SNP
  misc_feature (174)..(174): n is a, c, g, or t
  misc_feature (806)..(806): n is a, c, g, or t
aaaagttccctgctatagtgctaacccaagctaagattagccatgccctctcctcatctcctttggaaattgcagcagctgaggctgcaactcttgctccaagcaatagaactgttggtacgtttgaagccaaatttgataggacaagtataactatagcaagtatagctgttncactagcatgatctattcgagaatagggctccattaagtcccacatagcactaggaattccagtggacttaaagccctctactgtgataaacattccacagaagaataccaaaagtgaatatgagaccttgtctaagcttggccctgcatctttgaaatcaagaaccaccaaagttattgcagctgcaattgcagtccatgccatattcaaaccaatgagcattgcaatcaacattactagtgtgattgcataaacacaagatttccacagtaccctcttccattttttgttcatatagtccttttctcctgaagagagtataacawgtgcttcaataggtttatccactactattgcaacattttttgaaggattagtttcctcctttgtatcatttgtcccttccttggatgcatttgagtttgttgtgaaatcctttgtgccactatgaaccatctgaacttcactttcacttggagttgattggtctctcataacatgaacttgggaagagttttgaatactattagcaagttctacactgccattgcattcttgagaattaaaggatgtaaaatgagacattctggctggagaaaactgatgagaaacaacctcctcatccactacnacttctgaaactggatcctcttcatccttaggacaagatagtaccttccaatacatggctataagaaatacaacattcaccacaactcctacaagcatagctggaagaatacctatcagaaacctcccaaatgatattttaccttgaatagctataaccaaattctgggggttcccaattggggttgctgaggat

SEQ ID NO: 566 - DNA, 1005 bp, Artificial Sequence
  SNP
  misc_feature (434)..(437): n is a, c, g, or t
  misc_feature (742)..(745): n is a, c, g, or t
  misc_feature (767)..(767): n is a, c, g, or t
  misc_feature (884)..(886): n is a, c, g, or t
  misc_feature (896)..(896): n is a, c, g, or t
  misc_feature (900)..(900): n is a, c, g, or t
  misc_feature (909)..(909): n is a, c, g, or t
gatgtacatgtagaatttcacaaagcataaattgtattttatgtaacatattgttcttggtagacaggaaagaaattgcagaaatgaaaagaagactagcagcacaaatatatggcatactccctagctatcatatcaaccaaaaggatacgtatatacgagcaaatgcacacaacctatcatatcaaccaaaaaaaggatatatgactcatgtcagaaggtggagtttcaattccaacatggtaacgttgttctcaccatgaactcccatttttgcaaaaaaatatgctcccaagtttgtctctctaagaacatggccaacagagcaatccctcaaaagttgtagcaagatacggatgtctgctatgataaccggcctctcctaaaggtgagaagatgagtgtgataggaagtgatcaactagaccagacacnnnnatagatgatagacttattaggttattaactagctaggttaaacattaactacaacaaaacaatragtgattgaataactatcaacaagcgacttatatttcatcaaattgtgatttttttggaacccataagagagatctaaagaaaatttgtcgaatacttctatactgaatagatattcggtcaaaatagcaggataggtgttcggctcactacgagacaaaaagagtcctaagtaagaagcaatgaagattaagcccttaatcatagaatcatatatatcacctaaaaatggcaatcacccnnnngaaagttcaagggccaaggttnaaaaatgttagtataattaaataaaaatgagatgtttaaggtaaaggtagctgttcaccctcatttattaatgatatttattactctgaactggaatcttacttgaattcagaatgnnntttttttttncacngatactcantttttaaagtattacttcatcgatcgaatactaaaagaaaacatattaaagtaaaaaacacaaaaaaaaagagaaggtatctgatcatcttttggt

SEQ ID NO: 567 - DNA, 1001 bp, Artificial Sequence
  SNP
  misc_feature (226)..(226): n is a, c, g, or t
  misc_feature (252)..(252): n is a, c, g, or t
  misc_feature (329)..(329): n is a, c, g, or t
  misc_feature (413)..(413): n is a, c, g, or t
  misc_feature (490)..(490): n is a, c, g, or t
  misc_feature (617)..(617): n is a, c, g, or t
  misc_feature (620)..(620): n is a, c, g, or t
  misc_feature (661)..(661): n is a, c, g, or t
  misc_feature (685)..(685): n is a, c, g, or t
  misc_feature (688)..(688): n is a, c, g, or t
  misc_feature (714)..(714): n is a, c, g, or t
  misc_feature (743)..(743): n is a, c, g, or t
  misc_feature (888)..(888): n is a, c, g, or t
  misc_feature (952)..(952): n is a, c, g, or t
  misc_feature (979)..(979): n is a, c, g, or t
tatataatagaaagtcacctttcagcatgtggtatgaagttttcgtgataggttttcagctttaaggatgctgcagttctcttctcttattttccaaatagattaaaatatttctaaatctcaatcccgaaaaagacttacaaaacgtttatagctttttcatgaagtaaatccaatgcaaggactgcaaggtgtggaattccaagttatatcgaagcccatgaangaattttctttataaggtaagactangatgtaaaaaagtttgataaacgtttttgctgttttccttttgcagttttattaaattaaacgttatgtatgattantttgatgattatttgcacaatatgtttacgtactatgcatgaccacataaattaaaatgaaataaagagaatatgggatttcancgttatctttgagatgcaacgtatttgtaaatatattgttttaaatattaatatatatgctgattttactgaataanttttttacgtwtgctagctcttaattgttttccatttctgggttgtattatgggtccttttatttacttagagtaggcttgtttatgaaggaagtgaatattcgtgcattttgagattttgatcacnttntgggatatagcacatcatttaggtcgttgaaagtgtatatnacactgtcatattatataaaagtnagnttttttttttaaaaaaaatattactnaaagtgtaatctgccaattattttagtcnaagtttatatagatgagtagggtttaatgatttttgctgggtttgatgattagggtaatagtttacatagagggtttatttttggggtgcatatatttaggctagaggattcatcattttacataactattgagctagttgtgtnaggggcaagtattccttgtacccttcatcttcttccttatattaataatgtttgctcttagccnataaacaaaaaatagtttaaatttcanaatatcattacttaaatgataa

SEQ ID NO: 568 - DNA, 1006 bp, Artificial Sequence
  SNP
  misc_feature (39)..(39): n is a, c, g, or t
  misc_feature (50)..(50): n is a, c, g, or t
  misc_feature (166)..(166): n is a, c, g, or t
  misc_feature (169)..(169): n is a, c, g, or t
  misc_feature (210)..(210): n is a, c, g, or t
  misc_feature (234)..(234): n is a, c, g, or t
  misc_feature (237)..(237): n is a, c, g, or t
  misc_feature (263)..(263): n is a, c, g, or t
  misc_feature (292)..(292): n is a, c, g, or t
  misc_feature (437)..(437): n is a, c, g, or t
  misc_feature (528)..(528): n is a, c, g, or t
  misc_feature (581)..(581): n is a, c, g, or t
  misc_feature (595)..(598): n is a, c, g, or t
  misc_feature (622)..(622): n is a, c, g, or t
  misc_feature (691)..(695): n is a, c, g, or t
  misc_feature (811)..(812): n is a, c, g, or t
  misc_feature (892)..(892): n is a, c, g, or t
  misc_feature (967)..(969): n is a, c, g, or t
ttttaaatattaatatatatgctgattttactgaataanttttttacgtntgctagctcttaattgttttccatttctgggttgtattatgggtccttttatttacttagagtaggcttgtttatgaaggaagtgaatattcgtgcattttgagattttgatcacnttntgggatatagcacatcatttaggtcgttgaaagtgtatatnacactgtcatattatataaaagtnagnttttttttttaaaaaaaatattactnaaagtgtaatctgccaattattttagtcnaagtttatatagatgagtagggtttaatgatttttgctgggtttgatgattagggtaatagtttacatagagggtttatttttggggtgcatatatttaggctagaggattcatcattttacataactattgagctagttgtgtnaggggcaagtattccttgtacccttcatcttcttccttatattaataatgtttgctcttagccrataaacaaaaaatagtttaaatttcanaatatcattacttaaatgataatattaatatatttaagaacaaaggaaacagntacgtttaggagcnnnnttatttgacattttaggaactttnaaaaaaatgaaaatttgagaatttaacgtgactatatttacactttcagaccaaaatggtgttttatcnnnnnttttatagtcctatcgggctagaacctaccccatatgtagtttaatttcctccatgttaactatgtaactactctattttgtttgtttgcacctaccaagtatggcacatagcaanntttaaaaaagaaattagtggcccttatgcactattttctttttgaaaggggaaaagaaaaaggaaactaatacatagctngagtacatctttgatgtcgttatagtgtttgaataacaagagatttggatttagtaattatatggaggatgcacnnnatgatgtagttggaaaatatcttatcttattaaatat

SEQ ID NO: 569 - DNA, 1001 bp, Artificial Sequence
  SNP
  misc_feature (21)..(21): n is a, c, g, or t
  misc_feature (32)..(32): n is a, c, g, or t
  misc_feature (79)..(79): n is a, c, g, or t
  misc_feature (100)..(100): n is a, c, g, or t
  misc_feature (108)..(108): n is a, c, g, or t
  misc_feature (250)..(251): n is a, c, g, or t
  misc_feature (355)..(355): n is a, c, g, or t
  misc_feature (417)..(421): n is a, c, g, or t
  misc_feature (451)..(451): n is a, c, g, or t
  misc_feature (670)..(670): n is a, c, g, or t
cctagatttaataaaaatatntgtcagtattnaaaaaaaatctcgtgctttttatttgattgctgaagaaaaaaattancaattatgtagtataagttanaaaaaaantcatattctccctcaacaagaaattatagttaataagagtttcaaaaaagttactataatgatcaaccagcttattttatgtgataatttattattaaattatataaaattattttatattatcagtgtataatttattttnnaaaaaaaaatacataaatagtttattgtgtcagataaattctgattggaagctattaaagttgccctttagaacttttatatattttccagtgtgcacatatanaaaagagggtcacctttcacctagtggtatgaagtggaagtgtcttgaacaatagtcttcannnnngaggatgctgcaattctcttccaccatttnccaaacaaattaaaatgtttctgaatccaatttggaaaccaaaaagttcrtagcttttcatagagctttcaagtaattagccccgtgaaatatttttctttttacgcaagatgacaccacgggccttctaactgaaacaagcaataataataacaggccaaggaaaaactcagcagcattctgttagaaggaaaacacttatctctattagcatatttntctccattaatctcttacttcagtcctctatcaggtaagagtaggacgtaaaatgtgtgatagatgtttgtgttattgttttccttttccagttctgttgaattaaatgctgtattatatgatatccttgctgctaatatgcttaactgaatgagttttttacgtatgctctacgtgttttccaattcttgctttttctaaaagaatttcttgaacctcccctcatatttcctttgtgaacttaccagatttcatgcattttgagagtcatagaatttcttattatagttaggccgattctgctagaatctagctactgcatgcatgtact

SEQ ID NO: 570 - DNA, 1001 bp, Artificial Sequence
  SNP
  misc_feature (300)..(300): n is a, c, g, or t
  misc_feature (386)..(386): n is a, c, g, or t
  misc_feature (400)..(400): n is a, c, g, or t
  misc_feature (409)..(409): n is a, c, g, or t
  misc_feature (424)..(424): n is a, c, g, or t
  misc_feature (665)..(665): n is a, c, g, or t
  misc_feature (904)..(904): n is a, c, g, or t
tgaggctgcaactcttgctccaagcaatagaactagaaaacatatgaatagaagattgtgatgcatcaaatgaaaatggctcttgctaagtatggatataaaaaaaaaaaatactggtagtttagacaagaaatgaatgtgaaccttcattatgactaaatctagattgcatatatgtattatgacttaacattgcatacttttttttgcccatgacaattgaaaattttagggaaaatataatcctaacatatttctttttgtatgctactatagtttatatcaaacttggtttaaaantttaaaattgactaatgtcaaacacataaatttaacattatatcttatagcagtcatgaaagttcaaattaattaaaaaaatgctncatgttacgtatanctaattctnggaaacaatataagncatgcataacagaagccatttgaagatttaccattcactaattgtcatttaagcaaggtaaaaaaaattagtagacmgtcttttaatcatgaatcgaacataaaatagatgggtaacatataaataaacaagttgtaccagaaaaataattattttggcaggaagatcatgcacttacctgttggtacgtttgaagccaaatttgataggacaagtataactatagcaagtatagctgttncactagcatgatctattcgagaatagggctccattaagtcccacatagcactaggaattccagtggacttaaagccctctactgtgataaacattccacagaagaataccaaaagtgaatatgagacctgttccaagaagaaaatcactttaagagattgttcgaagttcagttggcacaagaataacaatagctagcatttcaaatggaaaagagagaaaatgaggttttgtacaagnggttgtgttatataagctttaccttgtctaagcttggccctgcatctttgaaatcaagaaccaccaaagttattgcagctgcaattgcagtccatgc

SEQ ID NO: 571 - DNA, 1005 bp, Artificial Sequence
  SNP
  misc_feature (83)..(83): n is a, c, g, or t
  misc_feature (102)..(102): n is a, c, g, or t
  misc_feature (116)..(116): n is a, c, g, or t
  misc_feature (142)..(142): n is a, c, g, or t
  misc_feature (149)..(150): n is a, c, g, or t
  misc_feature (259)..(260): n is a, c, g, or t
  misc_feature (510)..(510): n is a, c, g, or t
  misc_feature (521)..(521): n is a, c, g, or t
  misc_feature (681)..(681): n is a, c, g, or t
  misc_feature (720)..(721): n is a, c, g, or t
  misc_feature (801)..(801): n is a, c, g, or t
  misc_feature (818)..(818): n is a, c, g, or t
  misc_feature (823)..(823): n is a, c, g, or t
  misc_feature (836)..(836): n is a, c, g, or t
  misc_feature (871)..(871): n is a, c, g, or t
  misc_feature (877)..(878): n is a, c, g, or t
  misc_feature (885)..(885): n is a, c, g, or t
  misc_feature (887)..(892): n is a, c, g, or t
  misc_feature (915)..(915): n is a, c, g, or t
  misc_feature (998)..(998): n is a, c, g, or t
  misc_feature (1002)..(1002): n is a, c, g, or t
taataaaataaaataaataaaatgacttatcaaattttaagttttctataagtttttagaatattttatttttattgattaantattttactaattttattncacttttttgaaantgagtaaaaaacaaaaataaaaaatntatatannatttaattttaaactggataaataatttgatgaatgagtccttttttttagccaataagtgcatcttttattgatttgatttacattatattttatttaatctgtcacnncatgtaactgatggagatggcatccccatctttggttctagtcatcacttatggattgaccacaacgactcactcttcaattgcactgatggcctaattggtgctgttatgggctccactgccattaccatttccaacaactgcttcatcccctaactaggtcgatctactaattaatagtccttttggttaaaatatttgaaggaattctctcatcatgtgtttactttgttttaaccaagtartacgnccatagagagntagtgttgagtttattgacttcaaaattattcaggttatgctactggctcaacgtgactcttatgtccacgatcagcatatgcaaggaatcaatgcatacaaccatttcggggagaatcttaaccaaagaatgcccaggtaattaactaacatcttttangtagtagtagtatctctagatattttacttttttttttnnaattgtatatgtcattccatctaacattttgttcaattctatgataataatttttattacttattatttttaaaaatagncttagttactattttgntcttntaatttaattttnaagttcaatttgattctcttaatattaaaaagttnaatttnntcctctnannnnnntttttttaaatgacttaattagntccttttacttttagaagtttcaattaagtcatttattttttaaaataggttcaatttgatcttatttttctttcatgtgctncaanttt

SEQ ID NO: 572 - DNA, 1000 bp, Artificial Sequence
  SNP
  misc_feature (13)..(13): n is a, c, g, or t
  misc_feature (20)..(20): n is a, c, g, or t
  misc_feature (193)..(193): n is a, c, g, or t
  misc_feature (224)..(225): n is a, c, g, or t
  misc_feature (230)..(231): n is a, c, g, or t
  misc_feature (356)..(356): n is a, c, g, or t
  misc_feature (465)..(465): n is a, c, g, or t
  variation (501)..(501): or absent
  misc_feature (632)..(632): n is a, c, g, or t
  misc_feature (678)..(678): n is a, c, g, or t
  misc_feature (722)..(722): n is a, c, g, or t
  misc_feature (782)..(782): n is a, c, g, or t
  misc_feature (864)..(864): n is a, c, g, or t
ttgaaatgattangtgaatntaagcaaaaaatgtcgcgttaaattcgtatgtttgttattatttttcttgtggtataatttttattgtgtttttataatctttcgtgtgaagattgattatccaacacattttaattataggtatgtcctacatttgtctctatccaaaatcctcatgcctttaatttgatangaatacatgtttcaacagcttcttacaaacnnatatnnaatcttataaatatattctttattattaattaaaatttataaatttcacttcttatttaaaaaattaatatcactcataattttataattttattaataaaaaatatattaagaaaaatgtgttnaaaaatatctcaaataataatgattggaagctattactaaagttgccgcatatgacttttataatccagagtgtccgtataaatagagggtccactttcaccaagtagnaccaagttaagttgcctcttatgacttttatactcaaagagtgtacatgaaaagtgcaaagagagggtcacttttcgccaagtggtattacacagttgccgcttatgacttatcctttctcaccaggttgctagcatggaagaagtgtacttaattagtgtgcacanatataaatagagggtcaccttaatttctcattctcacaccaagtantagtgtcttgacaagttttcagctctgttgcaattccctcttcnaccattttgctagcaaactcacatttttatactcaatccaattcagaaaaaaactcttanaaaagttcatatagcttttcatggagccttcaagttattaaggtaagaatagcgagtaaagtgtgtgcatgataagtgtctntgttgtttttctattccagctcttttgaattaattgttatatgtatattatataatatctttgcttctaattggatcaattttgttttccaatataattctggctttcatgggtggttttgatttactaatagcgt

SEQ ID NO: 573 - DNA, 1001 bp, Artificial Sequence
  SNP
  misc_feature (9)..(9): n is a, c, g, or t
  misc_feature (50)..(50): n is a, c, g, or t
  misc_feature (53)..(53): n is a, c, g, or t
  misc_feature (646)..(646): n is a, c, g, or t
  misc_feature (824)..(824): n is a, c, g, or t
  misc_feature (958)..(958): n is a, c, g, or t
aaagaaaantttcttattacatagatttactctaatgtgaaagaacctanaanagtttttttacttaaaaaatccttcacgatacccgcatttgagatgcttttaagtacgtttgtcaaaagctgtaaatatgttaatgcaaatatacaattaagtggtaagtaacctaatacgaaatgttaattcttaaaactatgtaacaaatgataaagcttttatctgcatggggtgcaaagtgttgacattatatattgacactcaattttgtccaaacaaagaaagatgagaaagaataaattaaaaaatcggatagaaaatattaattaaaaaaatggagaacgttaatgcaataaagtggtacgtactttaatatttaactggtaaaacatcttactacaacaacctatcaaattataaagtaaaagtaacgtgcaggtgcgatgcgagtgctaagtgtgatgacactgtgtactagcactcaattttgtctaaagacaaaargaaagagttaataattagaagaagaaaagagacctttgttcaacatgcacacttgtattgcattttacttccactgtgttctatgctttaaactcccacttacatgtacatgcaccctctcaacatggacacctgtataattaanttgcataggtgggatcgatttgtttaatttgctatatatttaattaggttaatttcttgttgtctggctgatgagtgatgacattatcagttggtggaaaacacgacaatggatgatatatgggtcccttattctattttttaaaaatacttatctacataaggtgtttgacaacaanaaaattgatcgagctcatttttttcctttctagttttatgaatttcagcacttaattttgtgattttattctagaggttccatctcgtctcattgattagctaggaatataattttttttattataagccaaanatatattattaaaatcaaaccaccctcagcacaagttgtgcaa

SEQ ID NO: 574 - DNA, 1001 bp, Artificial Sequence
  SNP
  misc_feature (98)..(102): n is a, c, g, or t
  misc_feature (171)..(171): n is a, c, g, or t
  misc_feature (195)..(198): n is a, c, g, or t
  misc_feature (212)..(212): n is a, c, g, or t
  misc_feature (265)..(265): n is a, c, g, or t
  misc_feature (292)..(292): n is a, c, g, or t
  misc_feature (356)..(356): n is a, c, g, or t
  misc_feature (530)..(530): n is a, c, g, or t
  misc_feature (556)..(556): n is a, c, g, or t
  misc_feature (559)..(559): n is a, c, g, or t
  misc_feature (583)..(583): n is a, c, g, or t
  misc_feature (624)..(624): n is a, c, g, or t
  misc_feature (627)..(627): n is a, c, g, or t
  misc_feature (743)..(743): n is a, c, g, or t
  misc_feature (754)..(754): n is a, c, g, or t
  misc_feature (831)..(831): n is a, c, g, or t
  misc_feature (915)..(915): n is a, c, g, or t
  misc_feature (992)..(992): n is a, c, g, or t
ggtaggtgcaaacaaacaaaatagagtagttacatagttaacatggaggaaattaaactacatatggggtaggttctagcccgataggactataaaannnnngataaaacaccattttggtctgaaagtgtaaatatagtcacgttaaattctcaaattttcatttttttnaaagttcctaaaatgtcaaataannnngctcctaaacgtanctgtttcctttgttcttaaatatattaatattatcatttaagtaatgatattntgaaatttaaactattttttgtttatnggctaagagcaaacattattaatataaggaagaagatgaagggtacaaggaatacttgcccctnacacaactagctcaatagttatgtaaaatgatgaatcctctagcctaaatatatgcaccccaaaaataaaccctctatgtaaactattaccctaatcatcaaacccagcaaaaatcattaaaccctactcatctatataaacttsgactaaaataattggcagattacactttnagtaatattttttttaaaaaaaaaanctnacttttatataatatgacagtgtnatatacactttcaacgacctaaatgatgtgctatatcccanaangtgatcaaaatctcaaaatgcacgaatattcacttccttcataaacaagcctactctaagtaaataaaaggacccataatacaacccagaaatggaaaacaattaagagctagcanacgtaaaaaanttattcagtaaaatcagcatatatattaatatttaaaacaatatatttacaaatacgttgcatctcaaagataacgntgaaatcccatattctctttatttcattttaatttatgtggtcatgcatagtacgtaaacatattgtgcaaataatcatcaaantaatcatacataacgtttaatttaataaaactgcaaaaggaaaacagcaaaaacgtttatcaaacttttttacatcntagtcttac

SEQ ID NO: 575 - DNA, 1003 bp, Artificial Sequence
  SNP
  misc_feature (26)..(26): n is a, c, g, or t
  misc_feature (103)..(103): n is a, c, g, or t
  misc_feature (114)..(114): n is a, c, g, or t
  misc_feature (230)..(230): n is a, c, g, or t
  misc_feature (233)..(233): n is a, c, g, or t
  misc_feature (274)..(274): n is a, c, g, or t
  misc_feature (298)..(298): n is a, c, g, or t
  misc_feature (301)..(301): n is a, c, g, or t
  misc_feature (327)..(327): n is a, c, g, or t
  misc_feature (356)..(356): n is a, c, g, or t
  misc_feature (565)..(565): n is a, c, g, or t
  misc_feature (592)..(592): n is a, c, g, or t
  misc_feature (645)..(645): n is a, c, g, or t
  misc_feature (659)..(662): n is a, c, g, or t
  misc_feature (686)..(686): n is a, c, g, or t
  misc_feature (755)..(759): n is a, c, g, or t
  misc_feature (875)..(876): n is a, c, g, or t
  misc_feature (956)..(956): n is a, c, g, or t
gaaataaagagaatatgggatttcancgttatctttgagatgcaacgtatttgtaaatatattgttttaaatattaatatatatgctgattttactgaataanttttttacgtntgctagctcttaattgttttccatttctgggttgtattatgggtccttttatttacttagagtaggcttgtttatgaaggaagtgaatattcgtgcattttgagattttgatcacnttntgggatatagcacatcatttaggtcgttgaaagtgtatatnacactgtcatattatataaaagtnagnttttttttttaaaaaaaatattactnaaagtgtaatctgccaattattttagtcnaagtttatatagatgagtagggtttaatgatttttgctgggtttgatgattagggtaatagtttacatagagggtttatttttggggtgcatatatttaggctagaggattcatcattttacataactattgagctagttgtgtwaggggcaagtattccttgtacccttcatcttcttccttatattaataatgtttgctcttagccnataaacaaaaaatagtttaaatttcanaatatcattacttaaatgataatattaatatatttaagaacaaaggaaacagntacgtttaggagcnnnnttatttgacattttaggaactttnaaaaaaatgaaaatttgagaatttaacgtgactatatttacactttcagaccaaaatggtgttttatcnnnnnttttatagtcctatcgggctagaacctaccccatatgtagtttaatttcctccatgttaactatgtaactactctattttgtttgtttgcacctaccaagtatggcacatagcaanntttaaaaaagaaattagtggcccttatgcactattttctttttgaaaggggaaaagaaaaaggaaactaatacatagctngagtacatctttgatgtcgttatagtgtttgaataacaagagatttg

SEQ ID NO: 576 - DNA, 1009 bp, Artificial Sequence
  SNP
  misc_feature (52)..(52): n is a, c, g, or t
  misc_feature (80)..(80): n is a, c, g, or t
  misc_feature (107)..(107): n is a, c, g, or t
  misc_feature (135)..(135): n is a, c, g, or t
  misc_feature (231)..(233): n is a, c, g, or t
  misc_feature (308)..(308): n is a, c, g, or t
  misc_feature (388)..(389): n is a, c, g, or t
  variation (505)..(509): or absent
  misc_feature (578)..(578): n is a, c, g, or t
  misc_feature (602)..(605): n is a, c, g, or t
  misc_feature (619)..(619): n is a, c, g, or t
  misc_feature (672)..(672): n is a, c, g, or t
  misc_feature (699)..(699): n is a, c, g, or t
  misc_feature (763)..(763): n is a, c, g, or t
  misc_feature (908)..(908): n is a, c, g, or t
  misc_feature (937)..(937): n is a, c, g, or t
  misc_feature (963)..(963): n is a, c, g, or t
  misc_feature (966)..(966): n is a, c, g, or t
  misc_feature (990)..(990): n is a, c, g, or t
ttccttctttaggagagaaatgactcacatagcataggatatagatttggtntagtaattaaggaaatggagtattgatnaaataaaaaaaacgtgattctttaccnttgagattaagagtaatgataaaaaaanttattgaaaattaagagtatctcttatgtttaatcgatgtggtctcaatcattagacgatatttaataagataagatattttccaactacatcatnnngtgcatcctccatataattactaaatccaaatctcttgttattcaaacactataacgacatcaaagatgtactcnagctatgtattagtttcctttttcttttcccctttcaaaaagaaaatagtgcataagggccactaatttcttttttaaannttgctatgtgccatacttggtaggtgcaaacaaacaaaatagagtagttacatagttaacatggaggaaattaaactacatatggggtaggttctagcccgataggactataaaaacttagataaaacaccattttggtctgaaagtgtaaatatagtcacgttaaattctcaaattttcatttttttnaaagttcctaaaatgtcaaataannnngctcctaaacgtanctgtttcctttgttcttaaatatattaatattatcatttaagtaatgatattntgaaatttaaactattttttgtttatnggctaagagcaaacattattaatataaggaagaagatgaagggtacaaggaatacttgcccctnacacaactagctcaatagttatgtaaaatgatgaatcctctagcctaaatatatgcaccccaaaaataaaccctctatgtaaactattaccctaatcatcaaacccagcaaaaatcattaaaccctactcatctatataaacttngactaaaataattggcagattacactttnagtaatattttttttaaaaaaaaaanctnacttttatataatatgacagtgtnatatacactttcaacgacc

SEQ ID NO: 577 - DNA, 1001 bp, Artificial Sequence
  SNP
  misc_feature (583)..(583): n is a, c, g, or t
  misc_feature (643)..(643): n is a, c, g, or t
  misc_feature (687)..(687): n is a, c, g, or t
  misc_feature (733)..(733): n is a, c, g, or t
  misc_feature (864)..(864): n is a, c, g, or t
  misc_feature (900)..(900): n is a, c, g, or t
taaaaggctatttatccatattcaatatctcaaatgggtacctagcatgtgtatatgcatcatttaatggagtactgacacagtaaatatatatagaataaagtacatgccgtgcattccagcaaaatgggactacaataaggattttattgaactctcaaaatgcatgcatgaaatctattaagtacacaaagataatattagtggacggtttcaaccacttctttcagaaaaaccaagtttctatgttatttttatagcgtgtttgggatgtgattttccacgttttagatatgattttcagaaactaatacttatagctttcacatcccaaacgttatttcttaaacgagtttccataaacacgctattagtaaatcaaaaccacccatgaaagccagaattatattggaaaacaaaattgatccaattagaagcaaagatattatataatatacatataacaattaattcaaaagagctggaatagaaaaacaacasagacacttatcatgcacacactttactcgctattcttaccttaataacttgaaggctccatgaaaagctatatgaacttttntaagagtttttttctgaattggattgagtataaaaatgtgagtttgctagcaaaatggtngaagagggaattgcaacagagctgaaaacttgtcaagacactantacttggtgtgagaatgagaaattaaggtgaccctctatttatatntgtgcacactaattaagtacacttcttccatgctagcaacctggtgagaaaggataagtcataagcggcaactgtgtaataccacttggcgaaaagtgaccctctctttgcacttttcatgtacactcttngagtataaaagtcataagaggcaacttaacttggtnctacttggtgaaagtggaccctctatttatacggacactctggattataaaagtcatatgcggcaactttagtaatagcttccaatcattattatttgaga

SEQ ID NO: 578 - DNA, 1001 bp, Artificial Sequence
  SNP
  misc_feature (46)..(46): n is a, c, g, or t
  misc_feature (280)..(280): n is a, c, g, or t
  misc_feature (506)..(506): n is a, c, g, or t
  misc_feature (717)..(717): n is a, c, g, or t
  misc_feature (804)..(804): n is a, c, g, or t
  misc_feature (808)..(808): n is a, c, g, or t
  misc_feature (869)..(869): n is a, c, g, or t
  misc_feature (890)..(890): n is a, c, g, or t
  misc_feature (920)..(920): n is a, c, g, or t
  misc_feature (940)..(940): n is a, c, g, or t
  misc_feature (957)..(957): n is a, c, g, or t
aaagtactagccatcgagactctagtgcgcaccaccagagaaaaangtgattgcctcattccatcaaactttactactacaaattcaagacatacgatatccaatattcctataatgtactagccatatagactctagtgtgcaccagtagaaaggttcttgtccttattccatcaaactacttcttgtcacaagccaatatatacaacacaataagatttaattttgttttgtaagatattttaaaattataaagaacttgtagttcaaaatatcttantttgatacctataattgtaatctttttactcttttgatcattgtcatgaaatctctactaataacaccctttaaaagtagcatgacataactcatttaatccgtgttcatcgagtaaatattttgaagtcttgacacatttctaaaaggaagagccaaactacctgcgaaaaagaagattcaatcaatacatttagataagctttctgagtagatttattrtcatnattttaaaaatcagaccctgtcagttctcgtaaatttatgtttttttttaaatacttggtgcgtagtcctcttcacttcatttgattgcttatacctatcacaatcgcttagaacatagtcatagctctctatatggctaaacacatgcattcacagtacatttgatgatttcgaacgttgccaccatgtatgtagactgcaagtgtcctnattacatattatattacatatgtgatatttagtaatatttttttagtttaatacttaataaaaaatttgttaaatatctttgataanattnaaaaaaatatctttaaattataaataaactttataaatatgtttttatgatattttgatantttttaatgttataaaaaaantttaataatatttttattaagtctcagacnaaaaaaatattattaaaggncacatatataatataanagtgtgttacttttgtttcgctggggttgacataaaattaattt

SEQ ID NO: 579 - DNA, 1001 bp, Artificial Sequence
  SNP
  misc_feature (52)..(52): n is a, c, g, or t
  misc_feature (186)..(186): n is a, c, g, or t
  misc_feature (302)..(302): n is a, c, g, or t
  misc_feature (403)..(403): n is a, c, g, or t
  misc_feature (832)..(832): n is a, c, g, or t
ccttattctattttttaaaaatacttatctacataaggtgtttgacaacaanaaaattgatcgagctcatttttttcctttctagttttatgaatttcagcacttaattttgtgattttattctagaggttccatctcgtctcattgattagctaggaatataattttttttattataagccaaanatatattattaaaatcaaaccaccctcagcacaagttgtgcaaagataatgatagtaaagttagtcctgaaacctcatattaaataataataataatggcatccaaacttttattnaggcacttgtaaaaaatttaaagatgtttgttttgtcaaatttttgttcagagattaaaaagaatcttgatcagtcaaatttttattcaatgattaagaantaaattttaaaaaaatcaagaacaaaaacttttataatccatatgaaattgatgataaactaggtgtttgcttcgttgtgaaaattctgctatcatarcattcatcgaaagaaaaaggaaggtggtgcactttggtggtttcatcaagtgaggtgctgtctattccaaacaaaacttgtttgtgcatcatatgtgtgagagacttactaaatgcaggtcaggcatggcttgaaaaaagggagacaggctaggtctgtttcacacaaaagaagcgtggccaattattaaaaagaacttgattagatatgaagggtgtgttaataaatatctctcagcagtatgatgctctgtcttgttaattttgtttttcttttttaaagaaagagaaaaggctttagtctatacgataaataaaaaagagaagaaggnctttctttgtatcactttgaaatcatataatgactatcattttaatttttctcatcaagagaaaactaaatgctcaaaaatttgtttttattttattaaaaagggtaaataaatactattaatacacataatgatccaatcttacaattttgatgaataattaacaaag

SEQ ID NO: 580 - DNA, 1006 bp, Artificial Sequence
  SNP
  misc_feature (22)..(22): n is a, c, g, or t
  misc_feature (118)..(120): n is a, c, g, or t
  misc_feature (195)..(195): n is a, c, g, or t
  misc_feature (275)..(276): n is a, c, g, or t
  misc_feature (392)..(396): n is a, c, g, or t
  misc_feature (465)..(465): n is a, c, g, or t
  misc_feature (489)..(492): n is a, c, g, or t
  misc_feature (559)..(559): n is a, c, g, or t
  misc_feature (586)..(586): n is a, c, g, or t
  misc_feature (650)..(650): n is a, c, g, or t
  misc_feature (795)..(795): n is a, c, g, or t
  misc_feature (824)..(824): n is a, c, g, or t
  misc_feature (850)..(850): n is a, c, g, or t
  misc_feature (853)..(853): n is a, c, g, or t
  misc_feature (877)..(877): n is a, c, g, or t
  misc_feature (918)..(918): n is a, c, g, or t
  misc_feature (921)..(921): n is a, c, g, or t
ttaagagtaatgataaaaaaanttattgaaaattaagagtatctcttatgtttaatcgatgtggtctcaatcattagacgatatttaataagataagatattttccaactacatcatnnngtgcatcctccatataattactaaatccaaatctcttgttattcaaacactataacgacatcaaagatgtactcnagctatgtattagtttcctttttcttttcccctttcaaaaagaaaatagtgcataagggccactaatttcttttttaaannttgctatgtgccatacttggtaggtgcaaacaaacaaaatagagtagttacatagttaacatggaggaaattaaactacatatggggtaggttctagcccgataggactataaaannnnngataaaacaccattttggtctgaaagtgtaaatatagtcacgttaaattctcaaattttcatttttttnaaagttcctaaaatgtcaaataannnngctcctaaacgtarctgtttcctttgttcttaaatatattaatattatcatttaagtaatgatattntgaaatttaaactattttttgtttatnggctaagagcaaacattattaatataaggaagaagatgaagggtacaaggaatacttgcccctnacacaactagctcaatagttatgtaaaatgatgaatcctctagcctaaatatatgcaccccaaaaataaaccctctatgtaaactattaccctaatcatcaaacccagcaaaaatcattaaaccctactcatctatataaacttngactaaaataattggcagattacactttnagtaatattttttttaaaaaaaaaanctnacttttatataatatgacagtgtnatatacactttcaacgacctaaatgatgtgctatatcccanaangtgatcaaaatctcaaaatgcacgaatattcacttccttcataaacaagcctactctaagtaaataaaaggacccataatacaac

SEQ ID NO: 581 - DNA, 1006 bp, Artificial Sequence
  SNP
  misc_feature (28)..(28): n is a, c, g, or t
  misc_feature (43)..(43): n is a, c, g, or t
  misc_feature (50)..(50): n is a, c, g, or t
  misc_feature (62)..(62): n is a, c, g, or t
  misc_feature (93)..(93): n is a, c, g, or t
  misc_feature (137)..(137): n is a, c, g, or t
  misc_feature (153)..(154): n is a, c, g, or t
  misc_feature (323)..(323): n is a, c, g, or t
  misc_feature (351)..(351): n is a, c, g, or t
  misc_feature (378)..(378): n is a, c, g, or t
  misc_feature (406)..(406): n is a, c, g, or t
  variation (502)..(504): or absent
  misc_feature (579)..(579): n is a, c, g, or t
  misc_feature (659)..(660): n is a, c, g, or t
  misc_feature (776)..(780): n is a, c, g, or t
  misc_feature (849)..(849): n is a, c, g, or t
  misc_feature (873)..(876): n is a, c, g, or t
  misc_feature (890)..(890): n is a, c, g, or t
  misc_feature (943)..(943): n is a, c, g, or t
  misc_feature (970)..(970): n is a, c, g, or t
caaaactatactaataattgcaatccanttgataattatattnttaccantgtttctttttngctaaaagcaagataccaccacaattaaaangaccctgagactaattttttaagacgtagaaattattaaaatanttttttttctttcttnnttagtaaagtattttctatgtgtatgaataaagaatcaaattctcgtcaatatactcaagaaatccaattatcatagcagtaaattgttatgctatttctactatattgttattatgttccttctttaggagagaaatgactcacatagcataggatatagatttggtntagtaattaaggaaatggagtattgatnaaataaaaaaaacgtgattctttaccnttgagattaagagtaatgataaaaaaanttattgaaaattaagagtatctcttatgtttaatcgatgtggtctcaatcattagacgatatttaataagataagatattttccaactacatcatcatgtgcatcctccatataattactaaatccaaatctcttgttattcaaacactataacgacatcaaagatgtactcnagctatgtattagtttcctttttcttttcccctttcaaaaagaaaatagtgcataagggccactaatttcttttttaaannttgctatgtgccatacttggtaggtgcaaacaaacaaaatagagtagttacatagttaacatggaggaaattaaactacatatggggtaggttctagcccgataggactataaaannnnngataaaacaccattttggtctgaaagtgtaaatatagtcacgttaaattctcaaattttcatttttttnaaagttcctaaaatgtcaaataannnngctcctaaacgtanctgtttcctttgttcttaaatatattaatattatcatttaagtaatgatattntgaaatttaaactattttttgtttatnggctaagagcaaacattattaatataaggaagaaga

SEQ ID NO: 582 - DNA, 1004 bp, Artificial Sequence
  SNP
  misc_feature (20)..(20): n is a, c, g, or t
  misc_feature (105)..(105): n is a, c, g, or t
  misc_feature (116)..(116): n is a, c, g, or t
  misc_feature (163)..(163): n is a, c, g, or t
  misc_feature (184)..(184): n is a, c, g, or t
  misc_feature (192)..(192): n is a, c, g, or t
  misc_feature (334)..(335): n is a, c, g, or t
  misc_feature (439)..(439): n is a, c, g, or t
  variation (501)..(505): or absent
  misc_feature (535)..(535): n is a, c, g, or t
  misc_feature (585)..(585): n is a, c, g, or t
  misc_feature (754)..(754): n is a, c, g, or t
ttattaaatataaagtggtntgaagtgacgtaagtgcaagtatatgtgtgagtggcattttcaattaaaaagacagtggtacgtcctagatttaataaaaatatntgtcagtattnaaaaaaaatctcgtgctttttatttgattgctgaagaaaaaaattancaattatgtagtataagttanaaaaaaantcatattctccctcaacaagaaattatagttaataagagtttcaaaaaagttactataatgatcaaccagcttattttatgtgataatttattattaaattatataaaattattttatattatcagtgtataatttattttnnaaaaaaaaatacataaatagtttattgtgtcagataaattctgattggaagctattaaagttgccctttagaacttttatatattttccagtgtgcacatatanaaaagagggtcacctttcacctagtggtatgaagtggaagtgtcttgaacaatagtcttcagctctgaggatgctgcaattctcttccaccatttnccaaacaaattaaaatgtttctgaatccaatttggaaaccaaaaagttcntagcttttcatagagctttcaagtaattagccccgtgaaatatttttctttttacgcaagatgacaccacgggccttctaactgaaacaagcaataataataacaggccaaggaaaaactcagcagcattctgttagaaggaaaacacttatctctattagcatatttntctccattaatctcttacttcagtcctctatcaggtaagagtaggacgtaaaatgtgtgatagatgtttgtgttattgttttccttttccagttctgttgaattaaatgctgtattatatgatatccttgctgctaatatgcttaactgaatgagttttttacgtatgctctacgtgttttccaattcttgctttttctaaaagaatttcttgaacctcccctcatatttcctttgtgaacttaccagat

SEQ ID NO: 583 - DNA, 1001 bp, Artificial Sequence
  SNP
  misc_feature (81)..(82): n is a, c, g, or t
  misc_feature (186)..(186): n is a, c, g, or t
  misc_feature (248)..(252): n is a, c, g, or t
  misc_feature (282)..(282): n is a, c, g, or t
  misc_feature (332)..(332): n is a, c, g, or t
atcaaccagcttattttatgtgataatttattattaaattatataaaattattttatattatcagtgtataatttattttnnaaaaaaaaatacataaatagtttattgtgtcagataaattctgattggaagctattaaagttgccctttagaacttttatatattttccagtgtgcacatatanaaaagagggtcacctttcacctagtggtatgaagtggaagtgtcttgaacaatagtcttcannnnngaggatgctgcaattctcttccaccatttnccaaacaaattaaaatgtttctgaatccaatttggaaaccaaaaagttcntagcttttcatagagctttcaagtaattagccccgtgaaatatttttctttttacgcaagatgacaccacgggccttctaactgaaacaagcaataataataacaggccaaggaaaaactcagcagcattctgttagaaggaaaacacttatctctattagcatatttstctccattaatctcttacttcagtcctctatcaggtaagagtaggacgtaaaatgtgtgatagatgtttgtgttattgttttccttttccagttctgttgaattaaatgctgtattatatgatatccttgctgctaatatgcttaactgaatgagttttttacgtatgctctacgtgttttccaattcttgctttttctaaaagaatttcttgaacctcccctcatatttcctttgtgaacttaccagatttcatgcattttgagagtcatagaatttcttattatagttaggccgattctgctagaatctagctactgcatgcatgtactttgttcaatatgtgtcagtgatccataagtaatgcataatacacatgttagtccatatgggatctggaatttgatcaataatatttgcagatgatttcataacagactgatatacgtgcaacgtaattgttagaatagatttcgataccaccttaattttgaatttagg

SEQ ID NO: 584 - DNA, 1005 bp, Artificial Sequence
  SNP
  misc_feature (78)..(78): n is a, c, g, or t
  misc_feature (97)..(97): n is a, c, g, or t
  misc_feature (111)..(111): n is a, c, g, or t
  misc_feature (137)..(137): n is a, c, g, or t
  misc_feature (144)..(145): n is a, c, g, or t
  misc_feature (254)..(255): n is a, c, g, or t
  misc_feature (500)..(500): n is a, c, g, or t
  misc_feature (516)..(516): n is a, c, g, or t
  misc_feature (676)..(676): n is a, c, g, or t
  misc_feature (715)..(716): n is a, c, g, or t
  misc_feature (796)..(796): n is a, c, g, or t
  misc_feature (813)..(813): n is a, c, g, or t
  misc_feature (818)..(818): n is a, c, g, or t
  misc_feature (831)..(831): n is a, c, g, or t
  misc_feature (866)..(866): n is a, c, g, or t
  misc_feature (872)..(873): n is a, c, g, or t
  misc_feature (880)..(880): n is a, c, g, or t
  misc_feature (882)..(887): n is a, c, g, or t
  misc_feature (910)..(910): n is a, c, g, or t
  misc_feature (993)..(993): n is a, c, g, or t
  misc_feature (997)..(997): n is a, c, g, or t
aaataaaataaataaaatgacttatcaaattttaagttttctataagtttttagaatattttatttttattgattaantattttactaattttattncacttttttgaaantgagtaaaaaacaaaaataaaaaatntatatannatttaattttaaactggataaataatttgatgaatgagtccttttttttagccaataagtgcatcttttattgatttgatttacattatattttatttaatctgtcacnncatgtaactgatggagatggcatccccatctttggttctagtcatcacttatggattgaccacaacgactcactcttcaattgcactgatggcctaattggtgctgttatgggctccactgccattaccatttccaacaactgcttcatcccctaactaggtcgatctactaattaatagtccttttggttaaaatatttgaaggaattctctcatcatgtgtttactttgttttaaccaagtantacgrccatagagagntagtgttgagtttattgacttcaaaattattcaggttatgctactggctcaacgtgactcttatgtccacgatcagcatatgcaaggaatcaatgcatacaaccatttcggggagaatcttaaccaaagaatgcccaggtaattaactaacatcttttangtagtagtagtatctctagatattttacttttttttttnnaattgtatatgtcattccatctaacattttgttcaattctatgataataatttttattacttattatttttaaaaatagncttagttactattttgntcttntaatttaattttnaagttcaatttgattctcttaatattaaaaagttnaatttnntcctctnannnnnntttttttaaatgacttaattagntccttttacttttagaagtttcaattaagtcatttattttttaaaataggttcaatttgatcttatttttctttcatgtgctncaanttttttta

SEQ ID NO: 585 - DNA, 1006 bp, Artificial Sequence
  SNP
  misc_feature (17)..(18): n is a, c, g, or t
  misc_feature (127)..(128): n is a, c, g, or t
  misc_feature (135)..(135): n is a, c, g, or t
  misc_feature (161)..(161): n is a, c, g, or t
  misc_feature (175)..(175): n is a, c, g, or t
  misc_feature (194)..(194): n is a, c, g, or t
  misc_feature (388)..(388): n is a, c, g, or t
  misc_feature (966)..(966): n is a, c, g, or t
ctccatcagttacatgnngtgacagattaaataaaatataatgtaaatcaaatcaataaaagatgcacttattggctaaaaaaaaggactcattcatcaaattatttatccagtttaaaattaaatnntatatanattttttatttttgttttttactcantttcaaaaaagtgnaataaaattagtaaaatanttaatcaataaaaataaaatattctaaaaacttatagaaaacttaaaatttgataagtcattttatttattttattttattattatgcaaatggttgggattttcactttcattttatttgcatctaatattgtacttaataatgcatttatcaaaattaagtgaaaaaataaaattattttaataaaattgtntcctgataaatataaattctcttgaaatatttattttcttttgggacgaagggttttttttttttgcattttaagatctagtttaatagaatctattattgtagtactattattgarattttgtattattgtagtcctattatgctataatccaccacatgtagtttaatttgctcaactctgtcactactctattttgtgagttttgcacgtaccaagtgggggtacatagcaatttaaaaagagatacacaattttggatcacaacttagatgtagatgaatttcaatccttagatgaaaatcaggtcattcatgtttttctgatttcaccaattacgtcttccccttactacatttccaaatctctgatactaataaccccggacccaatatatataaaggtgtaagtctgctttctcaaacctccacctttttcactcatcaaataaatcagaaattaatatcaaataaattgtatcttcaaaatttaaatgttttcttaacatgcatatggtatattattttatgtttttaatataaactgaatgatttaactttaattttttatttcttttnatttatcatttttaacatttttaattctaaattgaatttg

SEQ ID NO: 586 - DNA, 1001 bp, Artificial Sequence
  SNP
  misc_feature (269)..(269): n is a, c, g, or t
  misc_feature (351)..(351): n is a, c, g, or t
  misc_feature (411)..(411): n is a, c, g, or t
  misc_feature (455)..(455): n is a, c, g, or t
  misc_feature (632)..(632): n is a, c, g, or t
  misc_feature (668)..(668): n is a, c, g, or t
  misc_feature (777)..(777): n is a, c, g, or t
  misc_feature (902)..(903): n is a, c, g, or t
  misc_feature (908)..(909): n is a, c, g, or t
  misc_feature (940)..(940): n is a, c, g, or t
aaaccaagtttctatgttatttttatagcgtgtttgggatgtgattttccacgttttagatatgattttcagaaactaatacttatagctttcacatcccaaacgttatttcttaaacgagtttccataaacacgctattagtaaatcaaaaccacccatgaaagccagaattatattggaaaacaaaattgatccaattagaagcaaagatattatataatatacatataacaattaattcaaaagagctggaatagaaaaacaacanagacacttatcatgcacacactttactcgctattcttaccttaataacttgaaggctccatgaaaagctatatgaacttttntaagagtttttttctgaattggattgagtataaaaatgtgagtttgctagcaaaatggtngaagagggaattgcaacagagctgaaaacttgtcaagacactantacttggtgtgagaatgagaaattaaggtgaccctctatttatatwtgtgcacactaattaagtacacttcttccatgctagcaacctggtgagaaaggataagtcataagcggcaactgtgtaataccacttggcgaaaagtgaccctctctttgcacttttcatgtacactcttngagtataaaagtcataagaggcaacttaacttggtnctacttggtgaaagtggaccctctatttatacggacactctggattataaaagtcatatgcggcaactttagtaatagcttccaatcattattatttgagatatttttnaacacatttttcttaatatattttttattaataaaattataaaattatgagtgatattaattttttaaataagaagtgaaatttataaattttaattaataataaagaatatatttataagattnnatatnngtttgtaagaagctgttgaaacatgtattcntatcaaattaaaggcatgaggattttggatagagacaaatgtaggacatacctataattaa

SEQ ID NO: 587 - DNA, 1005 bp, Artificial Sequence
  SNP
  misc_feature (168)..(168): n is a, c, g, or t
  misc_feature (196)..(196): n is a, c, g, or t
  misc_feature (223)..(223): n is a, c, g, or t
  misc_feature (251)..(251): n is a, c, g, or t
  misc_feature (347)..(349): n is a, c, g, or t
  misc_feature (424)..(424): n is a, c, g, or t
  variation (504)..(505): or absent
  misc_feature (621)..(625): n is a, c, g, or t
  misc_feature (694)..(694): n is a, c, g, or t
  misc_feature (718)..(721): n is a, c, g, or t
  misc_feature (735)..(735): n is a, c, g, or t
  misc_feature (788)..(788): n is a, c, g, or t
  misc_feature (815)..(815): n is a, c, g, or t
  misc_feature (879)..(879): n is a, c, g, or t
tagtaaagtattttctatgtgtatgaataaagaatcaaattctcgtcaatatactcaagaaatccaattatcatagcagtaaattgttatgctatttctactatattgttattatgttccttctttaggagagaaatgactcacatagcataggatatagatttggtntagtaattaaggaaatggagtattgatnaaataaaaaaaacgtgattctttaccnttgagattaagagtaatgataaaaaaanttattgaaaattaagagtatctcttatgtttaatcgatgtggtctcaatcattagacgatatttaataagataagatattttccaactacatcatnnngtgcatcctccatataattactaaatccaaatctcttgttattcaaacactataacgacatcaaagatgtactcnagctatgtattagtttcctttttcttttcccctttcaaaaagaaaatagtgcataagggccactaatttcttttttaaaaattgctatgtgccatacttggtaggtgcaaacaaacaaaatagagtagttacatagttaacatggaggaaattaaactacatatggggtaggttctagcccgataggactataaaannnnngataaaacaccattttggtctgaaagtgtaaatatagtcacgttaaattctcaaattttcatttttttnaaagttcctaaaatgtcaaataannnngctcctaaacgtanctgtttcctttgttcttaaatatattaatattatcatttaagtaatgatattntgaaatttaaactattttttgtttatnggctaagagcaaacattattaatataaggaagaagatgaagggtacaaggaatacttgcccctnacacaactagctcaatagttatgtaaaatgatgaatcctctagcctaaatatatgcaccccaaaaataaaccctctatgtaaactattaccctaatcatcaaacccagcaaaaatcattaaaccct

SEQ ID NO: 588 - DNA, 1006 bp, Artificial Sequence
  SNP
  misc_feature (18)..(18): n is a, c, g, or t
  misc_feature (62)..(62): n is a, c, g, or t
  misc_feature (78)..(79): n is a, c, g, or t
  misc_feature (248)..(248): n is a, c, g, or t
  misc_feature (276)..(276): n is a, c, g, or t
  misc_feature (303)..(303): n is a, c, g, or t
  misc_feature (331)..(331): n is a, c, g, or t
  misc_feature (427)..(429): n is a, c, g, or t
  misc_feature (584)..(585): n is a, c, g, or t
  misc_feature (701)..(705): n is a, c, g, or t
  misc_feature (774)..(774): n is a, c, g, or t
  misc_feature (798)..(801): n is a, c, g, or t
  misc_feature (815)..(815): n is a, c, g, or t
  misc_feature (868)..(868): n is a, c, g, or t
  misc_feature (895)..(895): n is a, c, g, or t
  misc_feature (959)..(959): n is a, c, g, or t
taccaccacaattaaaangaccctgagactaattttttaagacgtagaaattattaaaatanttttttttctttcttnnttagtaaagtattttctatgtgtatgaataaagaatcaaattctcgtcaatatactcaagaaatccaattatcatagcagtaaattgttatgctatttctactatattgttattatgttccttctttaggagagaaatgactcacatagcataggatatagatttggtntagtaattaaggaaatggagtattgatnaaataaaaaaaacgtgattctttaccnttgagattaagagtaatgataaaaaaanttattgaaaattaagagtatctcttatgtttaatcgatgtggtctcaatcattagacgatatttaataagataagatattttccaactacatcatnnngtgcatcctccatataattactaaatccaaatctcttgttattcaaacactataacgacatcaaagatgtactcragctatgtattagtttcctttttcttttcccctttcaaaaagaaaatagtgcataagggccactaatttcttttttaaannttgctatgtgccatacttggtaggtgcaaacaaacaaaatagagtagttacatagttaacatggaggaaattaaactacatatggggtaggttctagcccgataggactataaaannnnngataaaacaccattttggtctgaaagtgtaaatatagtcacgttaaattctcaaattttcatttttttnaaagttcctaaaatgtcaaataannnngctcctaaacgtanctgtttcctttgttcttaaatatattaatattatcatttaagtaatgatattntgaaatttaaactattttttgtttatnggctaagagcaaacattattaatataaggaagaagatgaagggtacaaggaatacttgcccctnacacaactagctcaatagttatgtaaaatgatgaatcctctagccta

SEQ ID NO: 589 - DNA, 1002 bp, Artificial Sequence
  SNP
  misc_feature (20)..(20): n is a, c, g, or t
  misc_feature (124)..(125): n is a, c, g, or t
  misc_feature (267)..(267): n is a, c, g, or t
  misc_feature (275)..(275): n is a, c, g, or t
  misc_feature (296)..(296): n is a, c, g, or t
  misc_feature (343)..(343): n is a, c, g, or t
  misc_feature (354)..(354): n is a, c, g, or t
  misc_feature (439)..(439): n is a, c, g, or t
  misc_feature (478)..(478): n is a, c, g, or t
  misc_feature (695)..(695): n is a, c, g, or t
  misc_feature (821)..(821): n is a, c, g, or t
  misc_feature (981)..(981): n is a, c, g, or t
tgaaaggtgaccctcttttntatatgtgcacactggaaaatatataaaagttctaaagggcaactttaatagcttccaatcagaatttatctgacacaataaactatttatgtatttttttttnnaaaataaattatacactgataatataaaataattttatataatttaataataaattatcacataaaataagctggttgatcattatagtaacttttttgaaactcttattaactataatttcttgttgagggagaatatgantttttttntaacttatactacataattgntaatttttttcttcagcaatcaaataaaaagcacgagattttttttnaatactgacanatatttttattaaatctaggacgtaccactgtctttttaattgaaaatgccactcacacatatacttgcacttacgtcacttcanaccactttatatttaataagtaattttgaaataactacnacatgataccatgttgcaattgrtactctccacaaaacattaacataatgataatttggataggatgaattaatattttaacatcgatgtgatatttgtatttacattcaatcttatctctccgtcttgcttccatcaaaaggttgaaatatttttgaagtattcacgcaagggaagcctttgagaacctattacattagtacgttgtatgggtatnattttttttttatatataaaaaaaatccatacaagaaatgagtatttgatatactaaaatacataaatttcgacatagtacaaaacatatgattggaatttatttccactattaaatagttaatangatatattagacaagaaaggaatattttttatcccattgataatgattgttcttttcttttcagtttgtataactagatcctgctattcaattaaaagaaaggatatagattctaaaacataaatgaagtaaaatatttataaattactatgacaataancggagtataaaacatgaacaa

SEQ ID NO: 590 - DNA, 1001 bp, Artificial Sequence
  SNP
  misc_feature (262)..(262): n is a, c, g, or t
  misc_feature (665)..(665): n is a, c, g, or t
  misc_feature (742)..(742): n is a, c, g, or t
  misc_feature (757)..(757): n is a, c, g, or t
  misc_feature (766)..(766): n is a, c, g, or t
  misc_feature (780)..(780): n is a, c, g, or t
  misc_feature (866)..(866): n is a, c, g, or t
aaaatgttgcaatagtagtggataaacctattgaagcacttgttatactctcttcaggagaaaaggactatatgaacaaaaaatggaagagggtactgtggaaatcttgtgtttatgcaatcacactagtaatgttgattgcaatgctcattggtttgaatatggcatggactgcaattgcagctgcaataactttggtggttcttgatttcaaagatgcagggccaagcttagacaaggtaaagcttatataacacaaccncttgtacaaaacctcattttctctcttttccatttgaaatgctagctattgttattcttgtgccaactgaacttcgaacaatctcttaaagtgattttcttcttggaacaggtctcatattcacttttggtattcttctgtggaatgtttatcacagtagagggctttaagtccactggaattcctagtgctatgtgggacttaatggagccctattctcgaatagatcatgctagtgraacagctatacttgctatagttatacttgtcctatcaaatttggcttcaaacgtaccaacaggtaagtgcatgatcttcctgccaaaataattatttttctggtacaacttgtttatttatatgttacccatctattttatgttcgattcatgattaaaagacngtctactaattttttttaccttgcttaaatgacaattagtgaatggtaaatcttcaaatggcttctgttatgcatgncttatattgtttccnagaattagntatacgtaacatgnagcatttttttaattaatttgaactttcatgactgctataagatataatgttaaatttatgtgtttgacattagtcaattttaaanttttaaaccaagtttgatataaactatagtagcatacaaaaagaaatatgttaggattatattttccctaaaattttcaattgtcatgggcaaaaaaaagtatgcaatgttaagtcataatacatatatgcaatc

SEQ ID NO: 591 - DNA, 1002 bp, Artificial Sequence
  SNP
  misc_feature (221)..(221): n is a, c, g, or t
  misc_feature (292)..(292): n is a, c, g, or t
  misc_feature (298)..(299): n is a, c, g, or t
  misc_feature (424)..(424): n is a, c, g, or t
  misc_feature (762)..(762): n is a, c, g, or t
  misc_feature (931)..(932): n is a, c, g, or t
gtctgggtagggtattgtgcgtagacatgtaccagcaccggcatttacacgggtaacaacttctgattctcatttctgtattagtttatatctatacctgcaagtcaataaatcactaaaaatattattgttaaatttttagaactaaatcgaaaactcatcctgaaatcttctaaacataatctcatgtgattaatctaattaagtatgtgattaagatnttcatttcaaacataaaaaagttacataaatttccaacatagtataaaacataatatttgaatgatctttntttttnngggtaaagatttgaatgatctatagttactaagcaaaagcatataatttttcacctcaaatataattatttatcaatataattaataaaccctttaatttttttttactgcaaataaatcctatnatcaatcatgatgaatgtttctttgataacaactacgttttctcttcacttcaggatataagaaatggtcgacttcaraaacaaaaacgataagaaatggtcaaaattttaaaactttgtaactgaaacagtgtcagcttttacatgatattgatcaaccttgagaggtttccacccaggctaatcaagattaaattaaatgcaaccaatatgtgctgccagaattaatgtgttctgaggtactttatttgatgggctatcataacagcttcgcaggctttgttctctcatgtgaagtttgaaacagattacaagaaactgcatgctacatatggcanagctctagtcgagggagtatattggatgaaggattttcctcaccaagttgccctcctgattcaatctgatgtaatttgatttctgttttggaataaaatcagatgaattactcttaaaaaaaatgtaaaacttcaaggaagtaaaatatctattttaatttgtacatcnnacaaaataaattatattacaactaaaatttgtaataaataatatttttaaacatataaataatattttag

SEQ ID NO: 592 - DNA, 1002 bp, Artificial Sequence
  SNP
  misc_feature (133)..(133): n is a, c, g, or t
  misc_feature (147)..(147): n is a, c, g, or t
  misc_feature (176)..(176): n is a, c, g, or t
  misc_feature (188)..(188): n is a, c, g, or t
  misc_feature (213)..(213): n is a, c, g, or t
  misc_feature (219)..(219): n is a, c, g, or t
  misc_feature (488)..(488): n is a, c, g, or t
  misc_feature (508)..(508): n is a, c, g, or t
  misc_feature (529)..(529): n is a, c, g, or t
  misc_feature (536)..(536): n is a, c, g, or t
  misc_feature (709)..(709): n is a, c, g, or t
  misc_feature (740)..(741): n is a, c, g, or t
  misc_feature (746)..(747): n is a, c, g, or t
  misc_feature (872)..(872): n is a, c, g, or t
  misc_feature (981)..(981): n is a, c, g, or t
ctgaataaatagatatatgctccaatatatatgcatgacgctcaaaaccgcgcagggaggcaacaaattaacaaacaacagtagctagtattttaacattatagaattttaagtcaacagacatgcacattanaaattgaattttgnaaattaaatttttattattaagatttagntgacttatatgnaaagtaaaatattatattttactanatgaanattatttaaatgaatatattagaagttgtttttatttcaacttttaagagagtttatttttgtttcaacttaatttatttattatagttggtgataatttttaccgtgaaaaaaaatagtatatgaagagaaagtgtgtgagaagaaagattgtgaaacaacagtcactttgttgatagaaaaatgattttgtgtaagaatgttatcattttttgtaacgtattcggttttatagggtgatacactatttgggaagagttacactcttntaatcatttttgtratagtnaaatacttttgaaatgattangtgaatntaagcaaaaaatgtcgcgttaaattcgtatgtttgttattatttttcttgtggtataatttttattgtgtttttataatctttcgtgtgaagattgattatccaacacattttaattataggtatgtcctacatttgtctctatccaaaatcctcatgcctttaatttgatangaatacatgtttcaacagcttcttacaaacnnatatnnaatcttataaatatattctttattattaattaaaatttataaatttcacttcttatttaaaaaattaatatcactcataattttataattttattaataaaaaatatattaagaaaaatgtgttnaaaaatatctcaaataataatgattggaagctattactaaagttgccgcatatgacttttataatccagagtgtccgtataaatagagggtccactttcaccaagtagnaccaagttaagttgcctctta

SEQ ID NO: 593 - DNA, 1001 bp, Artificial Sequence
  SNP
  misc_feature (315)..(315): n is a, c, g, or t
  misc_feature (397)..(397): n is a, c, g, or t
  misc_feature (457)..(457): n is a, c, g, or t
  misc_feature (547)..(547): n is a, c, g, or t
  misc_feature (678)..(678): n is a, c, g, or t
  misc_feature (714)..(714): n is a, c, g, or t
  misc_feature (823)..(823): n is a, c, g, or t
  misc_feature (948)..(949): n is a, c, g, or t
  misc_feature (954)..(955): n is a, c, g, or t
  misc_feature (986)..(986): n is a, c, g, or t
acacaaagataatattagtggacggtttcaaccacttctttcagaaaaaccaagtttctatgttatttttatagcgtgtttgggatgtgattttccacgttttagatatgattttcagaaactaatacttatagctttcacatcccaaacgttatttcttaaacgagtttccataaacacgctattagtaaatcaaaaccacccatgaaagccagaattatattggaaaacaaaattgatccaattagaagcaaagatattatataatatacatataacaattaattcaaaagagctggaatagaaaaacaacanagacacttatcatgcacacactttactcgctattcttaccttaataacttgaaggctccatgaaaagctatatgaacttttntaagagtttttttctgaattggattgagtataaaaatgtgagtttgctagcaaaatggtngaagagggaattgcaacagagctgaaaacttgtcaagacactamtacttggtgtgagaatgagaaattaaggtgaccctctatttatatntgtgcacactaattaagtacacttcttccatgctagcaacctggtgagaaaggataagtcataagcggcaactgtgtaataccacttggcgaaaagtgaccctctctttgcacttttcatgtacactcttngagtataaaagtcataagaggcaacttaacttggtnctacttggtgaaagtggaccctctatttatacggacactctggattataaaagtcatatgcggcaactttagtaatagcttccaatcattattatttgagatatttttnaacacatttttcttaatatattttttattaataaaattataaaattatgagtgatattaattttttaaataagaagtgaaatttataaattttaattaataataaagaatatatttataagattnnatatnngtttgtaagaagctgttgaaacatgtattcntatcaaattaaaggc

SEQ ID NO: 594 - DNA, 1001 bp, Artificial Sequence
  SNP
  misc_feature (369)..(369): n is a, c, g, or t
  misc_feature (572)..(572): n is a, c, g, or t
caggtctgtgttcagtatttgtctcaaacatctctgttctattttcaatattcattgaagttaaatctttggcttgtatgacaaattgaaggatgtttaccttggtaaacagaagtggaggtttaaggtgagagtggtttgcatttgtgatatgtgtcaagttagtgatcccattatccacttgaatttgtacagagatgtttgcaaaaatatatcacaatgatgctttatacaaggaattgtggcatgtctgtgtcaacctttgacactcttttgagtgaaggagagagggtttattacttccctcaaggtcatatggaacacgtacaagttgtatgggcatgtgctcttaatttctgactttaattncagttagatgcttgtgctactattatcttgctccatatcatgttttggatactagcataattgttttgtttccattttccaattaagatcttattggtgttggcatggttcacctaacagtgttttctcttracaattttatctataaaatttttatttttcttgatctgacttgtatgctagcaggaggcgtctttgtttanggtgtgtttgctgtaagttttaaaattgcacaagttgcgtctggtggcatttcagtttggatatgttagatatattgaactcagttactatttctatttccccttaagttttaaatgttaaaataaataaataaattgagagattaaaccaaatttgggtgtattttaattatagatttcatgccaggatttagtgattttggatttcttcagtgtcaagatttgttggtttatttaattttaatttatttattttcttgactgatttaattgcctttgctatttttgcagtgtctatctctgaatatccaagatcttcaaaggcaatgctatctctgagaaacatttttctgaggaatgtataagcttgatatttgctttcctttgatgattcatatttgttcctttttgggactttactgtttaaga

SEQ ID NO: 595 - DNA, 1001 bp, Artificial Sequence
  SNP
  misc_feature (26)..(26): n is a, c, g, or t
  misc_feature (171)..(171): n is a, c, g, or t
  misc_feature (200)..(200): n is a, c, g, or t
  misc_feature (226)..(226): n is a, c, g, or t
  misc_feature (229)..(229): n is a, c, g, or t
  misc_feature (253)..(253): n is a, c, g, or t
  misc_feature (294)..(294): n is a, c, g, or t
  misc_feature (297)..(297): n is a, c, g, or t
  misc_feature (413)..(413): n is a, c, g, or t
  misc_feature (424)..(424): n is a, c, g, or t
  misc_feature (585)..(585): n is a, c, g, or t
  misc_feature (662)..(662): n is a, c, g, or t
  misc_feature (688)..(688): n is a, c, g, or t
  misc_feature (988)..(988): n is a, c, g, or t
aagggtacaaggaatacttgcccctnacacaactagctcaatagttatgtaaaatgatgaatcctctagcctaaatatatgcaccccaaaaataaaccctctatgtaaactattaccctaatcatcaaacccagcaaaaatcattaaaccctactcatctatataaacttngactaaaataattggcagattacactttnagtaatattttttttaaaaaaaaaanctnacttttatataatatgacagtgtnatatacactttcaacgacctaaatgatgtgctatatcccanaangtgatcaaaatctcaaaatgcacgaatattcacttccttcataaacaagcctactctaagtaaataaaaggacccataatacaacccagaaatggaaaacaattaagagctagcanacgtaaaaaanttattcagtaaaatcagcatatatattaatatttaaaacaatatatttacaaatacgttgcatctcaaagataacgrtgaaatcccatattctctttatttcattttaatttatgtggtcatgcatagtacgtaaacatattgtgcaaataatcatcaaantaatcatacataacgtttaatttaataaaactgcaaaaggaaaacagcaaaaacgtttatcaaacttttttacatcntagtcttaccttataaagaaaattcnttcatgggcttcgatataacttggaattccacaccttgcagtccttgcattggatttacttcatgaaaaagctataaacgttttgtaagtctttttcgggattgagatttagaaatattttaatctatttggaaaataagagaagagaactgcagcatccttaaagctgaaaacctatcacgaaaacttcataccacatgctgaaaggtgactttctattatataagtgcacctggaggataagaagaaaatggcaacttcggtaataacttccaatttagaattacacgaatgaacaantttttcttcattt

SEQ ID NO: 596 - DNA, 1001 bp, Artificial Sequence
  SNP
  misc_feature (6)..(6): n is a, c, g, or t
  misc_feature (21)..(21): n is a, c, g, or t
  misc_feature (98)..(98): n is a, c, g, or t
  misc_feature (262)..(262): n is a, c, g, or t
attctnggaaacaatataagncatgcataacagaagccatttgaagatttaccattcactaattgtcatttaagcaaggtaaaaaaaattagtagacngtcttttaatcatgaatcgaacataaaatagatgggtaacatataaataaacaagttgtaccagaaaaataattattttggcaggaagatcatgcacttacctgttggtacgtttgaagccaaatttgataggacaagtataactatagcaagtatagctgttncactagcatgatctattcgagaatagggctccattaagtcccacatagcactaggaattccagtggacttaaagccctctactgtgataaacattccacagaagaataccaaaagtgaatatgagacctgttccaagaagaaaatcactttaagagattgttcgaagttcagttggcacaagaataacaatagctagcatttcaaatggaaaagagagaaaatgaggttttgtacaagmggttgtgttatataagctttaccttgtctaagcttggccctgcatctttgaaatcaagaaccaccaaagttattgcagctgcaattgcagtccatgccatattcaaaccaatgagcattgcaatcaacattactagtgtgattgcataaacacaagatttccacagtaccctcttccattttttgttcatatagtccttttctcctgaagagagtataacaagtgcttcaataggtttatccactactattgcaacattttttgaaggattagtttcctcctttgtatcatttgtcccttccttggatgcatttgagtttgttgtgaaatcctttgtgccactatgaaccatctgaacttcactttcacttggagttgattggtctctcataacatgaacttgggaagagttttgaatactattagcaagttctacactgccattgcattcttgagaattaaaggatgtaaaatgagacattctggctggagaaaactga

SEQ ID NO: 597 - DNA, 1001 bp, Artificial Sequence
  SNP
  misc_feature (402)..(402): n is a, c, g, or t
  misc_feature (606)..(606): n is a, c, g, or t
  misc_feature (608)..(622): n is a, c, g, or t
  misc_feature (631)..(631): n is a, c, g, or t
  misc_feature (705)..(705): n is a, c, g, or t
tacgtatccttttggttgatatgatagctagggagtatgccatatatttgtgctgctagtcttcttttcatttctgcaatttctttcctgtctaccaagaacaatatgttacataaaatacaatttatgctttgtgaaattctacatgtacatcggtacttttgcaccaaggaaataaggggagggggatactttaaatttgacagttttgtacttttgcttgattatttgttcatttgtaaaaaataatatatataatggtacatattattttttacaccctatcatttataggttgaatttgaagtatggcaagagctagtatgagttgcttataattgagttttgttccttttttttacgtgttttgttccttctaaaatgctgaaaagtttttttacnggtaaacattattctacagttggtctatgcagcagtatgcaatccaaattacacatttatgctatcaatacatagaaagccttttctttctcgccaacrccaagtataacaaatatcttatatatgaagtaaagcttttatgtaataaaggatatatgcactattaatctaaatattgttggagtagaaatgtaaagtgaaatntnnnnnnnnnnnnnnnctcagatanaagtggaaaagttgaacaacatataagtaaggagaacagctatacactttttaaggttttaggttaaaatgaantgtcaaatctccttttatgataaattataaaagaaagattcgttgttaaaattaataaagtaaaaaattataataagatttctactattcaaataattgtacaagaagttaagaagatattcaaaagaaaatagctaaagaagaaaaagagtttattacttaatgaataaattattttattagctttattatttgactaggcatcatatatctagaatataaaataagatataaattataaaagaaaggttggttgttaaaattaataaaatagaaaattataataaaatttctac

SEQ ID NO: 598 - DNA, 1013 bp, Artificial Sequence
  SNP
  misc_feature (56)..(56): n is a, c, g, or t
  misc_feature (132)..(136): n is a, c, g, or t
  misc_feature (185)..(185): n is a, c, g, or t
  misc_feature (200)..(200): n is a, c, g, or t
  misc_feature (207)..(207): n is a, c, g, or t
  misc_feature (219)..(219): n is a, c, g, or t
  misc_feature (250)..(250): n is a, c, g, or t
  misc_feature (294)..(294): n is a, c, g, or t
  misc_feature (310)..(311): n is a, c, g, or t
  misc_feature (480)..(480): n is a, c, g, or t
  misc_feature (535)..(535): n is a, c, g, or t
  misc_feature (563)..(563): n is a, c, g, or t
  misc_feature (659)..(661): n is a, c, g, or t
  misc_feature (736)..(736): n is a, c, g, or t
  misc_feature (816)..(817): n is a, c, g, or t
  misc_feature (933)..(937): n is a, c, g, or t
  misc_feature (1006)..(1006): n is a, c, g, or t
tatagattctaaaacataaatgaagtaaaatatttataaattactatgacaataancggagtataaaacatgaacaaactcatagaaatcaaagtcaaaatattaagaaaaaaatgttagctggccaacaannnnngcattaccaataaaaaagaatcaaaactatactaataattgcaatccanttgataattatattnttaccantgtttctttttngctaaaagcaagataccaccacaattaaaangaccctgagactaattttttaagacgtagaaattattaaaatanttttttttctttcttnnttagtaaagtattttctatgtgtatgaataaagaatcaaattctcgtcaatatactcaagaaatccaattatcatagcagtaaattgttatgctatttctactatattgttattatgttccttctttaggagagaaatgactcacatagcataggatatagatttggtntagtaattaaggaaatggagtattgatraaataaaaaaaacgtgattctttaccnttgagattaagagtaatgataaaaaaanttattgaaaattaagagtatctcttatgtttaatcgatgtggtctcaatcattagacgatatttaataagataagatattttccaactacatcatnnngtgcatcctccatataattactaaatccaaatctcttgttattcaaacactataacgacatcaaagatgtactcnagctatgtattagtttcctttttcttttcccctttcaaaaagaaaatagtgcataagggccactaatttcttttttaaannttgctatgtgccatacttggtaggtgcaaacaaacaaaatagagtagttacatagttaacatggaggaaattaaactacatatggggtaggttctagcccgataggactataaaannnnngataaaacaccattttggtctgaaagtgtaaatatagtcacgttaaattctcaaattttcatttttttnaaagttc

SEQ ID NO: 599 - DNA, 1001 bp, Artificial Sequence
  SNP
  misc_feature (282)..(282): n is a, c, g, or t
  misc_feature (451)..(451): n is a, c, g, or t
  misc_feature (531)..(535): n is a, c, g, or t
  misc_feature (597)..(597): n is a, c, g, or t
  misc_feature (701)..(702): n is a, c, g, or t
  misc_feature (844)..(844): n is a, c, g, or t
  misc_feature (852)..(852): n is a, c, g, or t
  misc_feature (873)..(873): n is a, c, g, or t
  misc_feature (920)..(920): n is a, c, g, or t
  misc_feature (931)..(931): n is a, c, g, or t
aagaaattctatgactctcaaaatgcatgaaatctggtaagttcacaaaggaaatatgaggggaggttcaagaaattcttttagaaaaagcaagaattggaaaacacgtagagcatacgtaaaaaactcattcagttaagcatattagcagcaaggatatcatataatacagcatttaattcaacagaactggaaaaggaaaacaataacacaaacatctatcacacattttacgtcctactcttacctgatagaggactgaagtaagagattaatggaganaaatatgctaatagagataagtgttttccttctaacagaatgctgctgagtttttccttggcctgttattattattgcttgtttcagttagaaggcccgtggtgtcatcttgcgtaaaaagaaaaatatttcacggggctaattacttgaaagctctatgaaaagctangaactttttggtttccaaattggattcagaaacattttaatttgtttggraaatggtggaagagaattgcagcatcctcnnnnntgaagactattgttcaagacacttccacttcataccactaggtgaaaggtgaccctcttttntatatgtgcacactggaaaatatataaaagttctaaagggcaactttaatagcttccaatcagaatttatctgacacaataaactatttatgtatttttttttnnaaaataaattatacactgataatataaaataattttatataatttaataataaattatcacataaaataagctggttgatcattatagtaacttttttgaaactcttattaactataatttcttgttgagggagaatatgantttttttntaacttatactacataattgntaatttttttcttcagcaatcaaataaaaagcacgagattttttttnaatactgacanatatttttattaaatctaggacgtaccactgtctttttaattgaaaatgccactcacacatatacttgca

SEQ ID NO: 600 - DNA, 1006 bp, Artificial Sequence
  SNP
  misc_feature (81)..(82): n is a, c, g, or t
  misc_feature (327)..(327): n is a, c, g, or t
  misc_feature (332)..(332): n is a, c, g, or t
  misc_feature (343)..(343): n is a, c, g, or t
  misc_feature (542)..(543): n is a, c, g, or t
  misc_feature (623)..(623): n is a, c, g, or t
  misc_feature (640)..(640): n is a, c, g, or t
  misc_feature (645)..(645): n is a, c, g, or t
  misc_feature (658)..(658): n is a, c, g, or t
  misc_feature (693)..(693): n is a, c, g, or t
  misc_feature (699)..(700): n is a, c, g, or t
  misc_feature (707)..(707): n is a, c, g, or t
  misc_feature (709)..(714): n is a, c, g, or t
  misc_feature (737)..(737): n is a, c, g, or t
  misc_feature (820)..(820): n is a, c, g, or t
  misc_feature (824)..(824): n is a, c, g, or t
  misc_feature (832)..(835): n is a, c, g, or t
  misc_feature (849)..(849): n is a, c, g, or t
  misc_feature (868)..(868): n is a, c, g, or t
  misc_feature (878)..(878): n is a, c, g, or t
  misc_feature (906)..(906): n is a, c, g, or t
  misc_feature (918)..(918): n is a, c, g, or t
  misc_feature (926)..(926): n is a, c, g, or t
  misc_feature (933)..(934): n is a, c, g, or t
  misc_feature (939)..(939): n is a, c, g, or t
  misc_feature (983)..(983): n is a, c, g, or t
  misc_feature (995)..(995): n is a, c, g, or t
  misc_feature (1005)..(1005): n is a, c, g, or t
gatgaatgagtccttttttttagccaataagtgcatcttttattgatttgatttacattatattttatttaatctgtcacnncatgtaactgatggagatggcatccccatctttggttctagtcatcacttatggattgaccacaacgactcactcttcaattgcactgatggcctaattggtgctgttatgggctccactgccattaccatttccaacaactgcttcatcccctaactaggtcgatctactaattaatagtccttttggttaaaatatttgaaggaattctctcatcatgtgtttactttgttttaaccaagtantacgnccatagagagntagtgttgagtttattgacttcaaaattattcaggttatgctactggctcaacgtgactcttatgtccacgatcagcatatgcaaggaatcaatgcatacaaccatttcggggagaatcttaaccaaagaatgcccaggtaattaactaacatcttttawgtagtagtagtatctctagatattttacttttttttttnnaattgtatatgtcattccatctaacattttgttcaattctatgataataatttttattacttattatttttaaaaatagncttagttactattttgntcttntaatttaattttnaagttcaatttgattctcttaatattaaaaagttnaatttnntcctctnannnnnntttttttaaatgacttaattagntccttttacttttagaagtttcaattaagtcatttattttttaaaataggttcaatttgatcttatttttctttcatgtgctncaantttttttnnnnaaaaataagatcanatttgattttaaatagganaaagttgaanttattttaaaaattaaggaacctaattnaaacttctaaanataaaagnacctaanngaaanacttttaaaaattaaagaacctaatcaaacattttaataataanaggatcaaattnaacttcatant

SEQ ID NO: 601 - DNA, 1001 bp, Artificial Sequence
  SNP
  misc_feature (633)..(633): n is a, c, g, or t
  misc_feature (704)..(704): n is a, c, g, or t
ccagatttcattaaggtgtaaaaaaacatgacagtgtgttagatttgaaagttagagctaaaaaagttctttatgagatggttgttcatatctacatctatatatgaaaggatttgttgtagttatgttcttcaggtctgtgttcagtatttgtctcaaacatctctgttctattttcaatattcattgaagttaaatctttggcttgtatgacaaattgaaggatgtttaccttggtaaacagaagtggaggtttaaggtgagagtggtttgcatttgtgatatgtgtcaagttagtgatcccattatccacttgaatttgtacagagatgtttgcaaaaatatatcacaatgatgctttatacaaggaattgtggcatgtctgtgtcaacctttgacactcttttgagtgaaggagagagggtttattacttccctcaaggtcatatggaacacgtacaagttgtatgggcatgtgctcttaatttctgactttaattrcagttagatgcttgtgctactattatcttgctccatatcatgttttggatactagcataattgttttgtttccattttccaattaagatcttattggtgttggcatggttcacctaacagtgttttctcttnacaattttatctataaaatttttatttttcttgatctgacttgtatgctagcaggaggcgtctttgtttanggtgtgtttgctgtaagttttaaaattgcacaagttgcgtctggtggcatttcagtttggatatgttagatatattgaactcagttactatttctatttccccttaagttttaaatgttaaaataaataaataaattgagagattaaaccaaatttgggtgtattttaattatagatttcatgccaggatttagtgattttggatttcttcagtgtcaagatttgttggtttatttaattttaatttatttattttcttgactgatttaattgcctttgctatttttgcagtgtcta

SEQ ID NO: 602 - DNA, 1001 bp, Artificial Sequence
  SNP
  misc_feature (158)..(158): n is a, c, g, or t
  misc_feature (284)..(284): n is a, c, g, or t
  misc_feature (478)..(478): n is a, c, g, or t
  misc_feature (540)..(540): n is a, c, g, or t
  misc_feature (625)..(625): n is a, c, g, or t
  misc_feature (636)..(636): n is a, c, g, or t
  misc_feature (683)..(683): n is a, c, g, or t
  misc_feature (704)..(704): n is a, c, g, or t
  misc_feature (712)..(712): n is a, c, g, or t
  misc_feature (854)..(855): n is a, c, g, or t
  misc_feature (959)..(959): n is a, c, g, or t
attgtcatagtaatttataaatattttacttcatttatgttttagaatctatatcctttcttttaattgaatagcaggatctagttatacaaactgaaaagaaaagaacaatcattatcaatgggataaaaaatattcctttcttgtctaatatatcntattaactatttaatagtggaaataaattccaatcatatgttttgtactatgtcgaaatttatgtattttagtatatcaaatactcatttcttgtatggattttttttatatataaaaaaaaaatnatacccatacaacgtactaatgtaataggttctcaaaggcttcccttgcgtgaatacttcaaaaatatttcaaccttttgatggaagcaagacggagagataagattgaatgtaaatacaaatatcacatcgatgttaaaatattaattcatcctatccaaattatcattatgttaatgttttgtggagagtancaattgcaacatggtatcatgtrgtagttatttcaaaattacttattaaatataaagtggtntgaagtgacgtaagtgcaagtatatgtgtgagtggcattttcaattaaaaagacagtggtacgtcctagatttaataaaaatatntgtcagtattnaaaaaaaatctcgtgctttttatttgattgctgaagaaaaaaattancaattatgtagtataagttanaaaaaaantcatattctccctcaacaagaaattatagttaataagagtttcaaaaaagttactataatgatcaaccagcttattttatgtgataatttattattaaattatataaaattattttatattatcagtgtataatttattttnnaaaaaaaaatacataaatagtttattgtgtcagataaattctgattggaagctattaaagttgccctttagaacttttatatattttccagtgtgcacatatanaaaagagggtcacctttcacctagtggtatgaagtggaagtg

SEQ ID NO: 603 - DNA, 1001 bp, Artificial Sequence
  SNP
  misc_feature (572)..(572): n is a, c, g, or t
  misc_feature (704)..(704): n is a, c, g, or t
aaaaaagaggagaattttcaaggaataagttgctcttgtatttgacctcttcactgcagaaagaaaatctctcttaaacagtaaagtcccaaaaaggaacaaatatgaatcatcaaaggaaagcaaatatcaagcttatacattcctcagaaaaatgtttctcagagatagcattgcctttgaagatcttggatattcagagatagacactgcaaaaatagcaaaggcaattaaatcagtcaagaaaataaataaattaaaattaaataaaccaacaaatcttgacactgaagaaatccaaaatcactaaatcctggcatgaaatctataattaaaatacacccaaatttggtttaatctctcaatttatttatttattttaacatttaaaacttaaggggaaatagaaatagtaactgagttcaatatatctaacatatccaaactgaaatgccaccagacgcaacttgtgcaattttaaaacttacagcaaacacaccrtaaacaaagacgcctcctgctagcatacaagtcagatcaagaaaaataaaaattttatagataaaattgtnaagagaaaacactgttaggtgaaccatgccaacaccaataagatcttaattggaaaatggaaacaaaacaattatgctagtatccaaaacatgatatggagcaagataatagtagcacaagcatctaactgnaattaaagtcagaaattaagagcacatgcccatacaacttgtacgtgttccatatgaccttgagggaagtaataaaccctctctccttcactcaaaagagtgtcaaaggttgacacagacatgccacaattccttgtataaagcatcattgtgatatatttttgcaaacatctctgtacaaattcaagtggataatgggatcactaacttgacacatatcacaaatgcaaaccactctcaccttaaacctccacttctgtttaccaaggtaaacatccttcaatttgtcatacaagc

SEQ ID NO: 604 - DNA, 1001 bp, Artificial Sequence
  SNP
  misc_feature (10)..(10): n is a, c, g, or t
  misc_feature (39)..(39): n is a, c, g, or t
  misc_feature (65)..(65): n is a, c, g, or t
  misc_feature (68)..(68): n is a, c, g, or t
  misc_feature (92)..(92): n is a, c, g, or t
  misc_feature (133)..(133): n is a, c, g, or t
  misc_feature (136)..(136): n is a, c, g, or t
  misc_feature (252)..(252): n is a, c, g, or t
  misc_feature (263)..(263): n is a, c, g, or t
  misc_feature (340)..(340): n is a, c, g, or t
  misc_feature (424)..(424): n is a, c, g, or t
  misc_feature (527)..(527): n is a, c, g, or t
  misc_feature (827)..(827): n is a, c, g, or t
  misc_feature (846)..(846): n is a, c, g, or t
tataaacttngactaaaataattggcagattacactttnagtaatattttttttaaaaaaaaaanctnacttttatataatatgacagtgtnatatacactttcaacgacctaaatgatgtgctatatcccanaangtgatcaaaatctcaaaatgcacgaatattcacttccttcataaacaagcctactctaagtaaataaaaggacccataatacaacccagaaatggaaaacaattaagagctagcanacgtaaaaaanttattcagtaaaatcagcatatatattaatatttaaaacaatatatttacaaatacgttgcatctcaaagataacgntgaaatcccatattctctttatttcattttaatttatgtggtcatgcatagtacgtaaacatattgtgcaaataatcatcaaantaatcatacataacgtttaatttaataaaactgcaaaaggaaaacagcaaaaacgtttatcaaacttttttacatcrtagtcttaccttataaagaaaattcnttcatgggcttcgatataacttggaattccacaccttgcagtccttgcattggatttacttcatgaaaaagctataaacgttttgtaagtctttttcgggattgagatttagaaatattttaatctatttggaaaataagagaagagaactgcagcatccttaaagctgaaaacctatcacgaaaacttcataccacatgctgaaaggtgactttctattatataagtgcacctggaggataagaagaaaatggcaacttcggtaataacttccaatttagaattacacgaatgaacaantttttcttcatttttaaanaagtaattaaatttgaggcacgtgataatttctcgagaccaacaactttttaattaaatcgtgggtatatatatatatactagtagtccactacttataattgaaaatgttagagtaaatgatcaattatattttgtttctgaaagcgtgtgatg

SEQ ID NO: 605 - DNA, 1013 bp, Artificial Sequence
  SNP
  misc_feature (84)..(84): n is a, c, g, or t
  misc_feature (160)..(164): n is a, c, g, or t
  misc_feature (213)..(213): n is a, c, g, or t
  misc_feature (228)..(228): n is a, c, g, or t
  misc_feature (235)..(235): n is a, c, g, or t
  misc_feature (247)..(247): n is a, c, g, or t
  misc_feature (278)..(278): n is a, c, g, or t
  misc_feature (322)..(322): n is a, c, g, or t
  misc_feature (338)..(339): n is a, c, g, or t
  misc_feature (536)..(536): n is a, c, g, or t
  misc_feature (563)..(563): n is a, c, g, or t
  misc_feature (591)..(591): n is a, c, g, or t
  misc_feature (687)..(689): n is a, c, g, or t
  misc_feature (764)..(764): n is a, c, g, or t
  misc_feature (844)..(845): n is a, c, g, or t
  misc_feature (961)..(965): n is a, c, g, or t
gatcctgctattcaattaaaagaaaggatatagattctaaaacataaatgaagtaaaatatttataaattactatgacaataancggagtataaaacatgaacaaactcatagaaatcaaagtcaaaatattaagaaaaaaatgttagctggccaacaannnnngcattaccaataaaaaagaatcaaaactatactaataattgcaatccanttgataattatattnttaccantgtttctttttngctaaaagcaagataccaccacaattaaaangaccctgagactaattttttaagacgtagaaattattaaaatanttttttttctttcttnnttagtaaagtattttctatgtgtatgaataaagaatcaaattctcgtcaatatactcaagaaatccaattatcatagcagtaaattgttatgctatttctactatattgttattatgttccttctttaggagagaaatgactcacatagcataggatatagatttggtrtagtaattaaggaaatggagtattgatnaaataaaaaaaacgtgattctttaccnttgagattaagagtaatgataaaaaaanttattgaaaattaagagtatctcttatgtttaatcgatgtggtctcaatcattagacgatatttaataagataagatattttccaactacatcatnnngtgcatcctccatataattactaaatccaaatctcttgttattcaaacactataacgacatcaaagatgtactcnagctatgtattagtttcctttttcttttcccctttcaaaaagaaaatagtgcataagggccactaatttcttttttaaannttgctatgtgccatacttggtaggtgcaaacaaacaaaatagagtagttacatagttaacatggaggaaattaaactacatatggggtaggttctagcccgataggactataaaannnnngataaaacaccattttggtctgaaagtgtaaatatagtcacgttaaat

SEQ ID NO: 606 - DNA, 1001 bp, Artificial Sequence
  SNP
  misc_feature (16)..(20): n is a, c, g, or t
  misc_feature (82)..(82): n is a, c, g, or t
  misc_feature (186)..(187): n is a, c, g, or t
  misc_feature (329)..(329): n is a, c, g, or t
  misc_feature (337)..(337): n is a, c, g, or t
  misc_feature (358)..(358): n is a, c, g, or t
  misc_feature (405)..(405): n is a, c, g, or t
  misc_feature (416)..(416): n is a, c, g, or t
  misc_feature (540)..(540): n is a, c, g, or t
  misc_feature (563)..(563): n is a, c, g, or t
  misc_feature (757)..(757): n is a, c, g, or t
  misc_feature (883)..(883): n is a, c, g, or t
aattgcagcatcctcnnnnntgaagactattgttcaagacacttccacttcataccactaggtgaaaggtgaccctcttttntatatgtgcacactggaaaatatataaaagttctaaagggcaactttaatagcttccaatcagaatttatctgacacaataaactatttatgtatttttttttnnaaaataaattatacactgataatataaaataattttatataatttaataataaattatcacataaaataagctggttgatcattatagtaacttttttgaaactcttattaactataatttcttgttgagggagaatatgantttttttntaacttatactacataattgntaatttttttcttcagcaatcaaataaaaagcacgagattttttttnaatactgacanatatttttattaaatctaggacgtaccactgtctttttaattgaaaatgccactcacacatatacttgcacttacgtcacttcamaccactttatatttaataagtaattttgaaataactacnacatgataccatgttgcaattgntactctccacaaaacattaacataatgataatttggataggatgaattaatattttaacatcgatgtgatatttgtatttacattcaatcttatctctccgtcttgcttccatcaaaaggttgaaatatttttgaagtattcacgcaagggaagcctttgagaacctattacattagtacgttgtatgggtatnattttttttttatatataaaaaaaatccatacaagaaatgagtatttgatatactaaaatacataaatttcgacatagtacaaaacatatgattggaatttatttccactattaaatagttaatangatatattagacaagaaaggaatattttttatcccattgataatgattgttcttttcttttcagtttgtataactagatcctgctattcaattaaaagaaaggatatagattctaaaa

SEQ ID NO: 607 - DNA, 1000 bp, Artificial Sequence
  SNP
  misc_feature (416)..(416): n is a, c, g, or t
  variation (500)..(500): or absent
  misc_feature (553)..(553): n is a, c, g, or t
actgacttatattgatctatattttacttttttatctaaatttttacagattcaaaagaaaaaaataaaaattaaaaaaaatatattatatcaaaataggctcaattgaattcacaccaatattttttgagtccaatataacctgatagtagactagtccaaatagtcacaattctatttggattaacattttattagtctaactcgacctgaatcaataggccaacagtgaactagctgatgcggtccattttgcgagctctatatggaaggatggtttttttggcacatatatcatgcatatatgtgtcactttcatagttcaatagaaaaaaagtcaagtaattgacaaaattaaaaaccaattcattacttaaaagtggggtcgtagtttgctgaatgccccacgcacaganagtaattggaggaaagtaaattctgctgccaaagatttcacataactcccaaactaacattcattactaattgaaatttcaaaagcattcctaacaaacttttagctaggaccatcacaatcatatacttatttgangatattaacaacaaaaacagagaaaattccttgttcatctacctatattttctaacacaacgttaaaatacattacaattaactgactttgcttgtgtaaacttctacgataagattctttggatttttagtaaactcttatcattttatgagtgtcaacccaatagcagtgactataagagttgaaggaaggccaacttttagatgagtccaaaaggttaatgtgtatccaaggtttggagctcgacgagcttgttcacacactatcaagttggcagctgatcctaatagtgaaaagttccctgctatagtgctaacccaagctaagattagccatgccctctcctcatctcctttggaaattgcagcagctgaggctgcaactcttgctccaagcaatagaactagaaaacatatgaatagaagattgtgatgcatcaaatgaaa

SEQ ID NO: 608 - DNA, 1001 bp, Artificial Sequence
  SNP
  misc_feature (185)..(185): n is a, c, g, or t
gaatagctataactagattctgggggttcccaattggggttgctgaggatccaatattagcacttgaagctagtgcaagaaggaaagggtaaggtgggaggttatgttgccttgctattttcaacacaaattcagtcaatacaacacaagatgtgtcattggtgaaaaaggcacttgatatagcngaaattaaacaaattctacagagtaagtcctttggtccttggcttttccaagagagcaatttccccaagtacttgaacatgtctgctctttcaagaaaaacagtaacaaccattgtcccaaaaagaagaccaagaattgggagatcaattgcagcaaaagcttgatctggattaagaactttgaatatgaccataaacattgcacctagtagggaccctgcagttctcccaatgggtagaaaaggcacacatgggaaaactgctagaacccagaaaactgcaaaggctattgagccaaagacaactgttggagtargagccaatgccattgttgtggttaaacaagcaacaatttccaaacaaatgttaattcaagcctccacttctaggcgaacacaatagaattttgtttggtacaatttcctgaacatggaaagccaattgattagtaactttgtaagagtgcatgaaaaaccaatctattatattcctcttcttattcaatctactactttgagacatgaattaagtgaatcattattattgaatattaatgatcaagcgggaacgtggatcggagtatgaatatattgtttatggtatttgacagaggtctgctacatcacatgaatacaggtatcgtatactgtgggttaattaaatttttgcaaacagataaataaattaaatatggacaagacatttgaatttgatgtactataaaacatgccagcagtgtattaaacataaaatcacatgactttccaagcatagcataaaaattaaaggaagcaattatcttgaaaaacaacttaa

SEQ ID NO: 609 - DNA, 1001 bp, Artificial Sequence
  SNP
  misc_feature (452)..(452): n is a, c, g, or t
  misc_feature (488)..(488): n is a, c, g, or t
atgttctaatgctcgaccttcacggtggtgagtttaattatatgagcggagagatccacaagtcgttgatggagttgcaacaattaaagtatttaaacctcagttggaattcttttcaaggcagaggaatcccagagtttcttggttctctcaccaacttgagataccttgatctggaatattgtcgttttggcggaaaaattccaactcagtttggctctctttctcatttgaaatacttaaatcttgctttgaattctctggagggttcaatccctcgtcaacttggaaatctctcccagttgcagcatcttgatctcagcgccaatcattttgaaggaaatataccctctcaaattggaaatctctcccagttgctgcatcttgatctcagctacaattcttttgaaggaagtataccgtcccaacttgggaacctttcaaatttgcanaagctttatcttggaggcggtgctctcaaaattgangatggagatcatwggctgtctaatctcatttctttaacccatctttccgtgttacagatgcctaatctcaacacttctcatagcttcctccaaatgattgccaagctaccaaaacttagagaactgagtttaagtgaatgtagccttcccgatcagtttatccttccattgaggccctctaaattcaatttttctagttccctttccgtccttgatctttccttcaacagcctcacgtcatcaatgatactccagtggctgtccaacgtcacttccaaccttgttgagcttgaccttagttataacctcttggagggttccacatcaaaccattttggccgtgtaatgaattctcttgagcacctcgacctctcatataatatattcaaggctgacgatttcaaatccttcgcgaatatatgcaccttacattctttatacatgccagcaaaccatttgactgaagaccttccatcaatccttcataatttgtctagtggttgtgttaaacac

SEQ ID NO: 610 - DNA, 1001 bp, Artificial Sequence
  SNP
  misc_feature (15)..(15): n is a, c, g, or t
  misc_feature (230)..(230): n is a, c, g, or t
  misc_feature (286)..(286): n is a, c, g, or t
  misc_feature (446)..(446): n is a, c, g, or t
acacatggagatgangcaggcctaatgcttcccccaaagattgcaccaatacaggtacatttggatgctattgatgtcttaaccttgatgtgtagacaccattagttaaattttgctgttgaaagttggaatactttgctccttggtcaggcaaatatgaaaataaagggaatgcttacttaaaatgaaaaagactcttctactccgaagtccaaactcctacatgcagntacaggattatgttccatgcctgtacttttatattgtaatttaaataaattataantttttcatttttgacaaaatcatggtgtgtgttgcctggttaggtggtaattgtacccatttggaagaaggatgatgaaaaagaggcagttctaaatgcagcatcatctgtaaaagatgttcttcaaagatctgggattaaagttaaacttgacgactcngatcaaagaactcctggatggaaattcaatttctgggaaatgaaggtttgttttwaaacttgaatggaaattcaatttctgggaccaaataatgcgcattgctttggctcatgctgcaggatctttgagtgtttgattatatttatatcatttacttcatatttagggagttcctcttagaattgaaattggtcctcgtgatgtggctagtggaagtgtggtgatatccaggagagatatccctgggaagcaagggaaagtgtttggaatctctatggagcctttaaatttggaggcttatgttaaagacaagttggatgaaatacagtcatctcttttggaaagggcaattgcatttcgagacaggttcattcctttaatgctacttttagcctggaactccttaacataaccttgtctaacatgcgttgaattgattttttcaaaataatctcatttatttattgataatagtcacattaatcatctttcctgaattgaagaatgttaatggtagcaaaatgcataatcttgggttctgtcaaaacaatgttg

SEQ ID NO: 611 - DNA, 1001 bp, Artificial Sequence
  SNP
tttttttttatcaatctgcttaataaagatttgcattcaacatgttatcgagatgaaacttcaattctgattagagagcagcaccaaaagactgcagttatgttttgtgcttatctttatggaaagagaatggtgctcaggaattgggttttgattttgtgtgtttgtattttgcagctggggttaccccttttgtggtggcagggattgaatttagcaaaataattgtaagtcactttttttggttgagctgctaactcataagttatgaagcccgtgtttcatgtcttcattgttggatatgttccagatagctcaaaaaagatgtgaggtgtgtggagggtcagggcttgttcttagggaaaaggaaaaggactatctccgttgcccagaatgtggtatgattgcattcacttctccttctcatatcatgtactccatttaaccaattaagtatgcagctgggagaatgttattgtatgtctctaaaatattgctaamttatgggactttttgatgtctcagtaattgaacatcatattcagtatcttgaatgtgtgtagttataaattatttggatgtacattgaacacctaggaattgcagaaatccctgcattcccaagctaatttgaatatctattgtcaacatgagaatattttgatgtcgaagaggagatatttttcatagatcctcttcttgatattagaaaagatagaaggtatgttgctgcctgctcctgttcttatttgcttttacatttcttttccaagaaattattagacactatggattcatcatatgcttcctcttcttggttcttttctgcatttatgtaataatatgacttttttactctttcaattccaattaatgtataggagaaatgctagtccaatttttacaactcattaagtaaattaattttcatgttacattatgtggtgtggttgttccatgtgacatgtaatcatatttttcaatatgaaaaagagttaata

SEQ ID NO: 612 - DNA, 1001 bp, Artificial Sequence
  SNP
tggaggagatggtggtgagggttttttggaatcattgttccggttggataaaagattgaggaaagtacgtaaaagaaagaggatgatgaaggtaacaactgggaggaagaaccaacttgaagagttttcttgctgagagatccacattgggtttctcagttgatagatgatgcaatgactcgggctgtgtgtagtatcttttctttataaggtagcgttggaggtcctcaccagctacgtgtttgtgaaaaatatgtatttttttttatcggtagaagtttataatattacgcatcttatgcaatcgattgaattagagtaaataattaatctgtcacttttttatcgttgaatatatagtatgggatatataaattcttttctagaaggaaataaggatagaaaaaacagaaaaacaagtaataaatatcaccatcattcatcaatggcggctgcaaaaatttggtaaaggaattatcaattaattagtccaaaaaatartgtaacagaaagaaagagccacgtagaatgaagaatcttatgctagatgaaattttctacacttatttatattatttttagaagcttctacacttatttcagtcgttattgatggcttttcgacaagctaggctcctattggaagggcggactggactgtaagtcatatatggatgctgcaattaataatgtaaagcaactatgaagtggataatattgtttgatcctgacatatatgttttagggtaatttctgcattaggtaacatgttttaattgatggtttaattattcatgaataatatacttgtaactattaatagttatatagagtatttggtaaagctaggttaaccatggggtcttccaagagaggtgttttgggagctaggtaacaatctttcgtagtagtttggagtagaatactaactaaaaaatttggtcgtttcttgttagatcgaggatgatacatggatatttatgtttttttttatacattta

SEQ ID NO: 613 - DNA, 1001 bp, Artificial Sequence
  SNP
tgacaagagatatacatttcaattgaagttgttaaaattagagttgagaacatgttttgtcattattttaagatgacatttgaatatacatttcttttaaattaatataattttattaagagaaagccaattcatcacaaggagtaccaaagaccagcttacacaaatattgttggtacaagagtattacaaaataacaactgaaacagaacacccctcacataaatccatacaaaataggatgcattaggaccaactacattgccctcaccataaaaaagaccaaagtaaatgttcttgacagaaccataaaatcgacaacttcaaactacacacactatagccagagagttaagcattacattacaagataaaatcacttccaagtgaatcaaaattgcttgaccaattgtccaattccacgctctgtgccaccaagctgatccaatgatatatgaaagacattgctgctgcaccggttgattcatcatcattaatccrattgaatagggaaatgatacatatatatgaaatgtggctagacacattgttatgataggcaaaattatttaaatggattagcagcagaggatgactaaagtgaatcaggtgcacatttccgttttcttgtgatgctgcttgtgttctatatagaaggctacctctgattttaaagctctggtcttgtccacacactcttctatagtaaattttagttcttatcattatttttgtaaatcttttatttgtaggttgaagatgcctcaaattagtctaacacaaatcgacggttcattttttttttttttaattagattaggggaagacatacccctttacaattgcaaggtcaaggaagaccaccaacttcactgagaatttagaagaatttacacatcatttatcaatgattaatacgagagtcgaactcaagtcatagtttttatgagtagaagactcgttcagaggtgtcaacgcttattagtagaacagttcgtttt

SEQ ID NO: 614 - DNA, 690 bp, Artificial Sequence
  SNP
  misc_feature (6)..(6): n is a, c, g, or t
  variation (218)..(507): or TAAT
ctaggntgttatagttttaattatttttcgtttgtgaggatagtttttgatatatacttattttttaaaatcaatatacataattaagtaattaaaaatgttaaattaaaatagattatgtaattattaaaattttaaaaattatcattctttgttgaaaatacttgatttaaatcttaagtagtataatttaaaaagataaagacatgcacttattaaattttcttttaaaattattgaagctaaattttaatttctccaatccccccgcaaaaaaaaaaggatcatattagcgattaagatttagcaggtggaatgaaatttcagaggttcctatctaggtcatacaaattgataattcatatcataataaaaaattaatgtgatgagaaacttttgtttgttctatttctgtatttcccttcaatattccagttattttgtgagacacgatataatgcttggggcagtgctggagcttgaaacaaaaaattgggagtcaaaaataagattggaatgaaaaaaatattcatagatttttcattttataatctcatctaaatttttttaatatttttttaaaaaaatcttaaaataacttatcatgcaataattttttactaattaagttattcaacccatcatatcaatatcaagtaaagataattatatttttaaaaagttaagtgc

SEQ ID NO: 615 - DNA, 1075 bp, Artificial Sequence; identical to SEQ ID NO: 497
  SNP
  misc_feature (361)..(361): n is a, c, g, or t
  misc_feature (369)..(369): n is a, c, g, or t
  misc_feature (372)..(372): n is a, c, g, or t
  misc_feature (400)..(400): n is a, c, g, or t
  misc_feature (723)..(723): n is a, c, g, or t
  misc_feature (821)..(821): n is a, c, g, or t

SEQ ID NO: 616 - DNA, 40 bp, Artificial Sequence
  Oligonucleotide
gacctgcaggcacctttacctatttcataatataattatc

SEQ ID NO: 617 - DNA, 32 bp, Artificial Sequence
  Oligonucleotide
gagacccgggggatgctttggtggtgaatgag

SEQ ID NO: 618 - DNA, 28 bp, Artificial Sequence
  Oligonucleotide
gagaaagcttgaaagcaagcattccctg

SEQ ID NO: 619 - DNA, 29 bp, Artificial Sequence
  Oligonucleotide
gagacccgggcaacgtttttttttttggt

SEQ ID NO: 620 - DNA, 22 bp, Artificial Sequence
  Oligonucleotide
atgtaggagggcgtggatatgt

SEQ ID NO: 621 - DNA, 20 bp, Artificial Sequence
  Oligonucleotide
tgccgtcaaccaagctctga

SEQ ID NO: 622 - DNA, 20 bp, Artificial Sequence
  Oligonucleotide
tgtgccttttctacccattg

SEQ ID NO: 623 - DNA, 19 bp, Artificial Sequence
  Oligonucleotide
gatttccacagtaccctct

SEQ ID NO: 624 - DNA, 19 bp, Artificial Sequence
  Oligonucleotide
ggagttgtggtgaatgttg

SEQ ID NO: 625 - DNA, 18 bp, Artificial Sequence
  Oligonucleotide
gggttttcccagtcacga

SEQ ID NO: 626 - DNA, 19 bp, Artificial Sequence
  Oligonucleotide
gtgagacccaatgaaagac

SEQ ID NO: 627 - DNA, 20 bp, Artificial Sequence
  Oligonucleotide
taaggtgggaggttatgttg

SEQ ID NO: 628 - DNA, 30 bp, Artificial Sequence
  Oligonucleotide
tatacccgggatggcattggctcctactcc

SEQ ID NO: 629 - DNA, 30 bp, Artificial Sequence
  Oligonucleotide
gcgcgagctctcattttatgagtgtcaacc

SEQ ID NO: 630 - DNA, 6269 bp, Artificial Sequence
  HiSil genomic DNA fragment for cisgenic transformation
cgatttagttctaaaaatttaacaataatatttttagtgatttattgacttgcaggtatagatataaactaatacagaaatgagaatcagaagttgttacccgtgtaaatgccggtgctggtacatgtctacgcacaataccctacccagaccttatttacaaatgatcctattcaaattaagagtaactcgaactcgtcaaatcctaattatcatcatataaatatctggtgaaaagtgctttgtaatgtatagttatttcaaaaattgataaagtggggtgacttgacctaagtcataatgaaaagtgctttgtcatgtagtagttaattatttcaaaattgataaagtggagtgacttgacctaactaagtatgtgattaaaaacttgattttttaattagtataaatgaaaatatttattgtaagagactagttttttaaataaatattaatattttaaaaagattaatcttaattttcaaaaaacaatatctgaataaatagatatatgctccaatatatatgcatgacgctcaaaaccgcgcagggaggcaacaaattaacaaacaacagtagctagtattttaacattatagaattttaagtcaacagacatgcacattaaaaattgaattttggaaattaaatttttattattaagatttagatgacttatatgcaaagtaaaatattatattttactaaatgaagattatttaaatgaatatattagaagttgtttttatttcaacttttaagagagtttatttttgtttcaacttaatttatttattatagttggtgataatttttaccgtgaaaaaaaatagtatatgaagagaaagtgtgtgagaagaaagattgtgaaacaacagtcactttgttgatagaaaaatgattttgtgtaagaatgttatcattttttgtaacgtattcggttttatagggtgatacactatttgggaagagttacactctttaatcatttttgtgatagtgaaatacttttgaaatgattatgtgaatgtaagcaaaaaatgtcgcgttaaattcgtatgtttgttattatttttcttgtggtataatttttattgtgtttttataatctttcgtgtgaagattgattatccaacacattttaattataggtatgtcctacatttgtctctatccaaaatcctcatgcctttaatttgatatgaatacatgtttcaacagcttcttacaaacatatatataatcttataaatatattctttattattaattaaaatttataaatttcacttcttatttaaaaaattaatatcactcataattttataattttattaataaaaaatatattaagaaaattgtgttaaaaaatatctcaaataataatgattggaagctattacaaaagttgccgcatatgacttttataatccagagtgtccgtataaatagagggtccactttcaccaagtagtaccaagttaagttgcctcttatgacttttatactcaaagagtgtacatgaaaagtgcaaaaagagggtcacttttcgccaagtggtattacacagttgccgcttatgacttatcctttctcaccaggttgctagcatggaagaagtgtacttaattagtgtgcacatatataaatagagggtcaccttaatttctcattctcacaccaagtagtagtgtcttgacaagttttcagctctgttgcaattccctcttctaccattttgctagcaaactcacatttttatactcaatccaattcagaaaaaaactcttacaaaagttcatatagcttttcatggagccttctagttattaaggtaagaatagcgagtaaagtgtgtgcatgataagtgtctgtgttgtttttctattccagctcttttgaattgagtgttatatgtatattatataatatctttgcttctaattggatcaattttgttttccaatataattctggctttcatgggtggttttgatttactaatagcgtgtttatggaaactcgtttaagaaataacgtttgggatgtgaaagctataagtattagtttctgaaaatcatatctaaaacgtggaaaatcacatcccaaacacgctataaaaataacatagaaacttggtttttctgaaagaagtagttgaaaccgtccacttatattttctttgtgtacttaatagatttcatgcatgcattttgagagttcaataaaatccttattgtagtcccattttgctggaatgcacggcatgtactttattctatatatatttactgtgtcagtactccattaaatgatgcatatacacatgctaggtacccatttgagatattgaatatggataaatagccttttaaaaaatgaaaaagaaaagaaactggtatatggagcttgtgtacggcttatatgtaccagtttttttttttcttttaccaaaaagctgatacgctgctcagccagctcaggtatatctttaatgctgttggaccatacaaatttgataccaattagcattgttttgttgacaaaacaaaaaggtcattttcctccaataagatatcaacacagtggcccgcgatgttgactgtgtgttgaaaaagttattattactattatgttgtgattcctcaattattggtattccttgtttgttggttggctataaccattttttttatattataggttatttatattaatttatgagcttgttaatttattatcctaattaagttgtttttcaagataattgcttcctttaatttttatgctatgcttggaaagtcatgtgattttatgtttactacactgctgtcatgttttatagtacatcaaattcaaatgtcttgtccatatttaattgatttatctatttgcaaaaatttaattaacccacagtatacgatacctgtattcatgtgatgtagcagacctctgtcaaataccagaaacaatatattcatactccgatccacgttcctgcttgatcattaatattcaataataatgattcacttaattaatgtctcaacgtagtagattgaataagaagaggaatctaatagattggtttttcatgcactcttacaaagttactaatcaattggctttccatgttcaggaaattgtaccaaacaaaattctattgtgttcgcctagaagtggaggcttgaattaacatttgtttggaaattgttgcttgtttaaccacaacaatggcattggctcctactccaacagttgtctttggctcaatagcctttgcagttttctgggttctagcagttttcccatgtgtgccttttctacccattgggagaactgcagggtccctactaggtgcaatgtttatggtcatattcaaagttcttaatccagatcaagcttttgctgcaattgatctcccaattcttggtcttctttttgggacaatggttgttactgtttttcttgaaagagcagacatgttcaagtacttggggaaattgctctcttggaaaagccaaggaccaaaggacttactctgtagaatttgtttaatttctgctatatcaagtgcttttttcaccaatgacacatcttgtgttgtattgactgaatttgtgttgaaaatagcaaggcaacataacctcccaccttaccctttccttcttgcactagcttcaagtgctaatattggatcctcagcaaccccaattgggaacccccagaatctagttatagctattcaaggtaaaatatcatttgggagctttctcactggtattcttccagctatgcttgtaggagttgtggtgaatgttgtaattcttatagccatgtattggaaggtgttaactattcataaggatgaagaggatccaatttcagaagttgctgaagaggagtttgtttcccatcagttttctccagccacaatgtcacattgtgcatcctttaattctcatgaatgcaatgacagtctagaacctactaatggtcttcaaaacccttctcaagtacatcctatcagaaaccaaacaactccaagtgtaagtgaagttcagatggttcttagtagcacaaaggattccacaacaaatgcatccaaggtggggataaatgatgcaaaggaggaaactaatccttcaaaagttgttgcaatagtagtagataaacctatagaagcacatgttatgcactcttcacaaggaaaggtggactatttgagaaaaaaatggaaaaggatagtgtggaaatcttgtgtttatgcaatcacgttgataatggtgattgcaatgcttcttggtgcaaatatggcatgggctgcaattgcagctgcaataactttggtggttcttgatttcaaagatgcagggccaagcatagacaaggtaatacttatatacaaaacctccttttatgtctcttccgtttgaaaagctattgttattattgtgtcaattgaactttgaacaatcacttatggtgattcttcttcttggcacaggtctcttattcactgttgatattcttttgtggaatgtttatcacagtagatggattcaagaaaactggaattccaggtgctctttgggacttaatggagccttattctcgaatagatcatgctagtggaatagctatactggctatagttatacttgtcctatcaaatttggcttcaaatgtaccaactggtaagtggatgataacctgccaaaataaattatttttctcgtatgacttgctcagtgatcaagctagaaatttcatatattgtgagagaataatataacgtgcgcacacatacattttcatcaataaacccatccatgaacttacttatatgttccccatctattttacatgtttgttgcataattatacgaagcaatataataatattttaccttactcaaatttgggaggaggatagcgaacatcatactttctaatagtttttaaaacaaactttctcttattatttgaaattcaagagggttccattacttcagtgacactcatatatatatgaatttcatccgataaaaaaaacgatgctaatatttttcagaacaagagtatttaaagcctagttggatacaaggttaaaagttcttttaagaatttctctattgaaaaaagctctatatttttagtagaagagatctcaaaagcacttgtgacttgtatccaaacagacccttagtaaatggtaaatcttcaaatgatttgtgttgtttatgatttatattgtttataagaatttttttttattaaattaatgaaataaaatattttacaatcatgtgtgagggtgtggaaatatgatatatttattttccccatgttttactaatcattattagttatagtactaaatatgtagcaatttttttaattaatttgagatttcattaaaattataagatgttcatccttatcaagagccattttcatctgatgtatcaaaacattctctttatgttttctagttctattgcttggagcacgagttgcagcctcagctgctactgtttccaaagaagatgagaagagagcatggctaatcttggcttgggtgagcaccatagcagggaacttttcactattaggatcagctgcaaacttggtagtgtgtgaacaagctcgcaaagctccaaacattggatacacgttaaccttttggacccacctaaaatttggccttccttccactcttatagtcactgctattgggttgacactcataaaatgataaaaaaaaaaaaaccctactaaatttttaagaatcctatcagagaaatttacacaagaaaaatcggtttattgtatataatatattctaaggctatgttagaaaagtttgtttaggaattattaaaaatttcaacttgtaaaataaatgtcagtttaggaattatgtgaaatattactgatacactgctttggttccttagttaactttctctatgatagctctagttagtgcactcacatcacatgttaccctttttcatctttatgtccctcgtgttgccatgatctgaaaagcttcttatcaatggttagggggttggttttgaacatattttaagagattaaaggaagtaaacgtgtggataaacatgtccattctgtatctgtggattgtcaattgttgtatctactaacaatgctaattttaatttgccaatacaatattaacaaaataaaagttcataactagtcaaccttgatccaaaaaaacaagagtaaaaaacaattcg

SEQ ID NO: 631 - DNA, 35 bp, Artificial Sequence
  Oligonucleotide
atggcattggctcttactccaacagttgtctttgg

SEQ ID NO: 632 - DNA, 35 bp, Artificial Sequence
  Oligonucleotide
atggcattggctcctactccaacagttgtctttgg

SEQ ID NO: 633 - DNA, 20 bp, Artificial Sequence
  Oligonucleotide
tttaaccacaacaatggcat

SEQ ID NO: 634 - DNA, 74 bp, Artificial Sequence
  Oligonucleotide
gtttggaaattgttgcttgtttaaccacaacaatggcattcgctcctactccaacagttgtctttggctcaata

SEQ ID NO: 635 - DNA, 29 bp, Artificial Sequence
  Oligonucleotide
aatttcagctatatcaagtgcctttttca

SEQ ID NO: 636 - DNA, 29 bp, Artificial Sequence
  Oligonucleotide
aatttctgctatatcaagtgcttttttca

SEQ ID NO: 637 - DNA, 20 bp, Artificial Sequence
  Oligonucleotide
agatgtgtcattggtgaaaa

SEQ ID NO: 638 - DNA, 83 bp, Artificial Sequence
  Oligonucleotide
aaggacttactctgtagaatttgtttaatttctgctatatcaagtgcttttttcaccaatgacacatcttgtgttgtattgac
